(19) United States
(12) Patent Application Publication
(10) Pub. No.: US 2025/0290099 A1
(43) Pub. Date: Sep. 18, 2025

(54) MATERIALS AND METHODS FOR TARGETED GENETIC MANIPULATIONS IN CELLS

(71) Applicant: The Regents of the University of California, Oakland, CA (US)

(72) Inventors: Brian Shy, San Francisco, CA (US); Vivasvan Vykunta, San Francisco, CA (US); Alexander Marson, San Francisco, CA (US)

(73) Assignee: The Regents of the University of California, Oakland, CA (US)

(21) Appl. No.: 18/688,882

(22) PCT Filed: Aug. 30, 2022
(86) PCT No.: PCT/US2022/042004

§ 371 Date: Mar. 4, 2024

Related U.S. Application Data
(60) Provisional application No. 63/240,306, filed on Sep. 2, 2021.

(51) Int. Cl. C12N 15/90; C12N 9/22; C12N 13/00; C12N 15/11

(52) U.S. Cl. CPC C12N 15/907; C12N 9/226; C12N 13/00; C12N 15/11; C12N 2310/20

(57) ABSTRACT

Methods for editing the genome of cells such as T cells and hematopoietic stem cells are disclosed. The methods include inserting a nucleic acid sequence of an exogenous partial open reading frame (ORF) of an autosomal dominant gene (e.g., CTLA4) into an intronic target region of an endogenous autosomal dominant gene in the cell, wherein the endogenous autosomal dominant gene comprises one or more disease-causing mutations; the exogenous partial ORF of the autosomal dominant gene is free of disease-causing mutations; and insertion of the exogenous partial ORF of the autosomal dominant gene into the intronic target region results in a modified autosomal dominant gene that encodes a protein which is free of disease-causing mutations. Methods for treating haploinsufficiency and methods for increasing gene editing efficiency are also described.

### CROSS-REFERENCE TO RELATED PATENT APPLICATIONS

[0001] The present application is a 371 U.S. Patent Application of International Application No. PCT/US2022/042004 filed Aug. 30, 2022 which claims benefit of priority to U.S. Provisional Patent Application No. 63/240,306, filed Sep. 2, 2021, which are incorporated by reference for all purposes.

### STATEMENT AS TO RIGHTS TO INVENTIONS MADE UNDER FEDERALLY SPONSORED RESEARCH AND DEVELOPMENT

[0002] This invention was made with government support under Contract No. U19AI135990 awarded by The National Institutes of Health. The government has certain rights in the invention.

### REFERENCE TO A “SEQUENCE LISTING”

[0003] A Sequence Listing conforming to the rules of WIPO Standard ST.26 is hereby incorporated by reference. Said Sequence Listing has been filed as an electronic document via PatentCenter encoded as XML in UTF-8 text. The electronic document, created on Oct. 13, 2022, is entitled “081906-1338596-243710PC_SL_ST26.xml”, and is 892,570 bytes in size. The Sequence Listing is hereby incorporated by reference in its entirety for all purposes.

### BACKGROUND OF THE INVENTION

[0004] Disease-causing mutations in the cytotoxic T-lymphocyte-associated protein 4 (CTLA4) gene most commonly manifest as a Primary Immunodeficiency (PID) referred to as CTLA4 HaploInsufficiency (CHAI) or CTLA deficiency. Patients with this disease develop a variety of autoimmune manifestations and have increased susceptibility to infection. They are currently treated predominantly with IV or subcutaneous injections of a recombinant CTLA4-Ig fusion protein called abatacept. Most patients with this disease have one good copy of the affected gene, and disrupting this allele could worsen their disease.

### BRIEF SUMMARY OF THE INVENTION

[0005] Provided herein are methods for editing the genome of a cell such as a human T cell. The methods include inserting a nucleic acid sequence of an exogenous partial open reading frame (ORF) of an autosomal dominant gene into an intronic target region of an endogenous autosomal dominant gene in the T cell, wherein:
[0006] the endogenous autosomal dominant gene comprises one or more disease-causing mutations,
[0007] the exogenous partial ORF of the autosomal dominant gene is free of disease-causing mutations, and
[0008] insertion of the exogenous partial ORF of the autosomal dominant gene into the intronic target region results in a modified autosomal dominant gene that encodes a protein which is free of disease-causing mutations.

[0009] In some embodiments, the autosomal dominant gene is CTLA4, and wherein insertion of an exogenous CLTA4 partial ORF into the intronic target region of an endogenous CLTA4 gene results in a modified CTLA4 gene that encodes a CTLA4 protein which is free of disease-causing mutations. In some embodiments, the autosomal dominant gene is CD7, LRBA, CD40LG, MAGT1, WASP, RHOH, BCL10, ITGB2, IL10RA, SAP, PI3KCD, CD4, CD5, STAT3, ZAP70, PI3KR1, STIM1, CD45, CD3D, CD2, CD3G, CD3Z, or CD3E, and wherein insertion of an exogenous CD7, LRBA, CD40LG, MAGT1, WASP, RHOH, BCL10, ITGB2, IL10RA, SAP, PI3KCD, CD4, CD5, STAT3, ZAP70, PI3KR1, STIM1, CD45, CD3D, CD2, CD3G, CD3Z, or CD3E partial ORF into the intronic target region of an endogenous CD7, LRBA, CD40LG, MAGT1, WASP, RHOH, BCL10, ITGB2, IL10RA, SAP, PI3KCD, CD4, CD5, STAT3, ZAP70, PI3KR1, STIM1, CD45, CD3D, CD2, CD3G, CD3Z, or CD3E gene results in a modified CD7, LRBA, CD40LG, MAGT1, WASP, RHOH, BCL10, ITGB2, IL10RA, SAP, PI3KCD, CD4, CD5, STAT3, ZAP70, PI3KR1, STIM1, CD45, CD3D, CD2, CD3G, CD3Z, or CD3Eene that encodes a CD7, LRBA, CD40LG, MAGT1, WASP, RHOH, BCL10, ITGB2, IL10RA, SAP, PI3KCD, CD4, CD5, STAT3, ZAP70, PI3KR1, STIM1, CD45, CD3D, CD2, CD3G, CD3Z, or CD3E protein which is free of disease-causing mutations In some embodiments, the intronic target region is in intron 1 of the endogenous CTLA4 gene and the exogenous CTLA4 partial ORF comprises exons 2-4 of CTLA4. In some embodiments, the intronic target region is in intron 1 of the endogenous CTLA4 gene and the exogenous CTLA4 partial ORF consists of exons 2-4 of CTLA4.

[0010] In some embodiments, the nucleic acid sequence of the exogenous CTLA4, CD7, LRBA, CD40LG, MAGT1, WASP, RHOH, BCL10, ITGB2, IL10RA, SAP, PI3KCD, CD4, CD5, STAT3, ZAP70, PI3KR1, STIM1, CD45, CD3D, CD2, CD3G, CD3Z, or CD3E partial ORF is inserted into the intronic target region by introducing into the cell: (a) a targeted nuclease that creates an insertion site in the intronic target region; (b) a guide RNA that specifically hybridizes to the intronic target region; and (c) a DNA template comprising the nucleic acid sequence of the exogenous CTLA4, CD7, LRBA, CD40LG, MAGT1, WASP, RHOH, BCL10, ITGB2, IL10RA, SAP, PI3KCD, CD4, CD5, STAT3, ZAP70, PI3KR1, STIM1, CD45, CD3D, CD2, CD3G, CD3Z, or CD3E partial ORF.

[0011] In some embodiments, the DNA template is a single-stranded DNA template, the 5′ end and the 3′ end of the DNA template comprise nucleotide sequences that are homologous to genomic sequences flanking the intronic target region, the DNA template further comprises a nuclease binding sequence, wherein the nuclease binding sequence forms a double-stranded duplex with a complementary nucleotide sequence. In some embodiments, the double-stranded duplex is formed with an oligonucleotide or polynucleotide comprising the complementary nucleotide sequence. In some embodiments, the targeted nuclease is a Cas9 nuclease. In some embodiments, the targeted nuclease, the guide RNA, and the DNA template are introduced into the cell as a ribonucleoprotein complex (RNP)-DNA template complex. In some embodiments, introducing the RNP-DNA template complex into the cell comprises electroporation.

[0012] In some embodiments, the targeted nuclease, the guide RNA, and the DNA template are introduced into the cell in the presence of one or more small molecules selected from the group consisting of a DNA-dependent protein kinase (DNA-PK) inhibitor, a histone deacetylase (HDAC) inhibitor, and a cell division cycle 7-related protein kinase (CDC7) inhibitor. In some embodiments, the DNA-PK inhibitor is (S)-(2-chloro-4-fluoro-5-(7-morpholinoquinazolin-4-yl)phenyl)(6-methoxypyridazin-3-yl)methanol (M3814) or 8-(dibenzo[b,d]thiophen-4-yl)-2-morpholino-4H-chromen-4-one (NU7441). In some embodiments, the HDAC inhibitor is [R-(E,E)]-7-[4-(dimethylamino)phenyl]-N-hydroxy-4,6-dimethyl-7-oxo-2,4-heptadienamide (trichostatin A). In some embodiments, the CDC7 inhibitor is (S)-8-chloro-2-(pyrrolidin-2-yl)benzofuro[3,2-d]pyrimidin-4(3H)-one hydrochloride (XL413).

[0013] In some embodiments, the method further comprises administering the cell comprising the modified autosomal dominant gene to a human subject. In some embodiments, the subject is the same subject from whom the cell having the endogenous autosomal dominant gene was obtained. In some embodiments, the cell is a human cell. In some embodiments, the cell is a T cell or a hematopoietic stem cell.

[0014] Also provided are isolated cells having an edited genome, which cell is prepared according to the method described above or elsewhere herein.

[0015] Also provided is an isolated cell having an edited genome comprising a modified CTLA4 gene comprising an CTLA4 open reading frame (ORF) comprising an endogenous exon 1 and exogenous exons 2-4, wherein the exogenous exons are free of disease-causing mutations. In some embodiments, the cell is a human cell. In some embodiments, the cell is a T cell or a hematopoietic stem cell.

[0016] Also provided is a method for treating a haploinsufficiency. In some embodiments, the method comprises administering a therapeutically effective amount of cells, as described above or elsewhere herein, to a subject in need thereof. In some embodiments, the haploinsufficiency causes a primary immunodeficiency. In some embodiments, the haploinsufficiency is CTLA4, CD7, LRBA, CD40LG, MAGT1, WASP, RHOH, BCL10, ITGB2, IL10RA, SAP, PI3KCD, CD4, CD5, STAT3, ZAP70, PI3KR1, STIM1, CD45, CD3D, CD2, CD3G, CD3Z, or CD3E haploinsufficiency.

[0017] Also provided is a method for generating nucleotide deletions in a target gene in a cell, the method comprising: electroporating the cell in the presence of:
[0018] (i) a ribonucleoprotein (RNP) complex comprising a targeted nuclease and a guide RNA, wherein the guide RNA specifically hybridizes to a nucleotide sequence in the target gene, and
[0019] (ii) one or more small molecules selected from the group consisting of a DNA-dependent protein kinase (DNA-PK) inhibitor, a histone deacetylase (HDAC) inhibitor, and a cell division cycle 7-related protein kinase (CDC7) inhibitor,
[0020] wherein electroporating the cell is conducted in the absence of a homology directed repair template, thereby introducing the RNP into the cell; and
[0021] maintaining the cell under conditions for forming one or more nucleotide deletions in the target gene.

[0022] Also provided is a method for modifying a target gene in a cell, the method comprising:
[0023] electroporating the cell in the presence of:
[0024] (a) a ribonucleoprotein (RNP) complex comprising a guide RNA and a targeted nuclease, wherein the guide RNA specifically hybridizes to a nucleotide sequence in a genomic target region and the targeted nuclease creates an insertion site in the genomic target region;
[0025] (b) a single-stranded DNA template comprising an exogenous nucleic acid sequence, wherein the 5′ end and the 3′ end of the DNA template comprise nucleotide sequences that are homologous to genomic sequences flanking the genomic target region, and wherein the DNA template further comprises a nuclease binding sequence, wherein the nuclease binding sequence forms a double-stranded duplex with a complementary nucleotide sequence; and
[0026] (c) one or more molecules selected from the group consisting of a DNA-dependent protein kinase (DNA-PK) inhibitor, a histone deacetylase (HDAC) inhibitor, and a cell division cycle 7-related protein kinase (CDC7) inhibitor,
[0027] thereby modifying the target gene.

[0028] In some embodiments, the DNA-PK inhibitor is (S)-(2-chloro-4-fluoro-5-(7-morpholinoquinazolin-4-yl)phenyl)(6-methoxypyridazin-3-yl)methanol (M3814) or 8-(dibenzo[b,d]thiophen-4-yl)-2-morpholino-4H-chromen-4-one (NU7441). In some embodiments, the HDAC inhibitor is [R-(E,E)]-7-[4-(dimethylamino)phenyl]-N-hydroxy-4,6-dimethyl-7-oxo-2,4-heptadienamide (trichostatin A). In some embodiments, the CDC7 inhibitor is (S)-8-chloro-2-(pyrrolidin-2-yl)benzofuro[3,2-d]pyrimidin-4(3H)-one hydrochloride (XL413). Also provided is a method for modifying a target gene in a cell, the method comprising: combining the cell with:
[0029] (a) a targeted nuclease that creates an insertion site in a genomic target region in the cell,
[0030] (b) a guide RNA that specifically hybridizes to the genomic target region,
[0031] (c) a DNA template comprising an exogenous nucleic acid sequence, and
[0032] (d) one or more small molecules selected from the group consisting of
[0033] (S)-(2-chloro-4-fluoro-5-(7-morpholinoquinazolin-4-yl)phenyl)(6-methoxypyridazin-3-yl)methanol (M3814) at a concentration of 0.2 μM to 1 μM,
[0034] 8-(dibenzo[b,d]thiophen-4-yl)-2-morpholino-4H-chromen-4-one (NU7441) at a concentration of 0.2 μM to 1 μM,
[0035] [R-(E,E)]-7-[4-(dimethylamino)phenyl]-N-hydroxy-4,6-dimethyl-7-oxo-2,4-heptadienamide (trichostatin A) at a concentration of 0.015 μM to 0.075 μM, and
[0036] (S)-8-chloro-2-(pyrrolidin-2-yl)benzofuro[3,2-d]pyrimidin-4(3H)-one hydrochloride (XL413) at a concentration of 2 μM to 15 μM;
[0037] electroporating the cell, the targeted nuclease, the guide RNA, the DNA template, and the small molecules; and
[0038] maintaining the cell under conditions for insertion of the exogenous nucleic acid sequence into the insertion site, thereby modifying the target gene.

[0039] In some embodiments, the cell is combined with the M3814 and trichostatin A. In some embodiments, the cell is combined with the M3814, the trichostatin A, and the XL413In some embodiments, the cell is a human cell. In some embodiments, the human cell is a T cell or a hematopoietic stem cell.

[0040] Also provided herein are methods for treating a haploinsufficiency. The methods include administering a therapeutically effective amount of modified cells as described herein to a subject in need thereof.

[0041] Also provided herein are methods of gene editing having increased efficiency. The methods include electroporating cells (e.g., T cells) in the presence of a ribonucleoprotein (RNP) complex comprising a guide RNA and a targeted nuclease; a DNA template; and one or more molecules selected from the group consisting of a DNA-dependent protein kinase (DNA-PK) inhibitor, a histone deacetylase (HDAC) inhibitor, and a cell division cycle 7-related protein kinase (CDC7) inhibitor.

### BRIEF DESCRIPTION OF THE DRAWINGS

[0042] FIG. 1 shows the development of ssCTS templates for high yield knock-in. (a) Diagram of hybrid ssDNA HDRT designs incorporating CTS sites (ssCTS). (b) Panel of ssCTS designs tested. (c) Knock-in efficiency for each ssCTS design using a CD5-HA knock-in construct at 160 nM-4 uM concentration assessed by flow cytometry. Dotted line represents mean knock-in percentage for control ssDNA HDRTs without CTS (construct a, grey). (d-f) Knock-in strategy, gating, knock-in efficiency, live cell counts, and knock-in cell counts are shown for large ssCTS templates including (d) a tNGFR knock-in at the IL2RA locus, (e) a IL2RA-GFP fusion protein knock-in to the IL2RA locus, or (f) two different HDRTs inserting a BCMA-CAR construct at TRAC locus via two different gRNAs (g526 and g527). Each experiment was performed with T cells from 2 independent healthy human blood donors. Error bars indicate standard deviation. RNP=Ribonucleoprotein, CTS=Cas9 Target Site, ssCTS=ssDNA HDRT+CTS sites, HDRT=homology-directed-repair template.

[0043] FIG. 2 shows screening with short CD5-HA ssCTS templates. (a) Diagram of CD5-HA knock-in strategy and control ssDNA HDRTs. (b) Representative flow cytometry plots demonstrating CD5-HA knock-in. (c) Live cell counts for each ssCTS design using a CD5-HA knock-in construct at 160 nM-4 uM concentration. Each experiment was performed with T cells from 2 independent healthy human blood donors. Error bars indicate standard deviation. RNP=Ribonucleoprotein, HDRT=homology-directed-repair template.

[0044] FIG. 3 shows optimization of ssCTS design with large CD5-HA HDRTs. (a-f) Comparison of different CTS designs with a large ˜2.7 kb CD5-HA knock-in construct. (a) Diagram of long CD5-HA knock-in strategy, representative flow cytometry plot, % knock-in, live cell counts, and knock-in cell yield counts. (b) Comparison of CTS with a gRNA target sequence that is specific for the cognate RNP (+CD5 CTS), an alternative gRNA sequence (+IL2RA CTS), a CTS incorporating a PAM site and scrambled gRNA sequence (+scramble CTS), or an equivalent amount of dsDNA within the 5′ end of the homology arm (+end protection). (c) Comparison of complementary oligos covering different regions of the CTS and surrounding sequences. Constructs with CTS sites on both 5′ and 3′ end (green bars), 5′ end only (blue blurs), or 3′ end only (red bars) are shown on the right panel. (d) Evaluation of varied 5′ ends including different length of buffer sequence upstream of the CTS site. *indicates no data available for the marked column. (e) Comparison of CTS with different numbers of scrambled bases at the 5′ end of the gRNA target sequence using WT or SpyFi Cas9. (f) Length of homology arm that is covered by the complementary oligonucleotide. (g) Comparison of HDRT variations for knock-in constructs targeting a tNGFR marker across 22 different target loci. Shown for each construct are live cell counts, knock-in cell count yields, relative % knock-in and relative knock-in counts compared to dsDNA templates. Each experiment was performed with T cells from 2 independent healthy human blood donors. Error bars indicate standard deviation. CTS=Cas9 Target Site, PAM=Protospacer Adjacent Motif, HDRT=homology-directed-repair template

[0045] FIG. 4 shows evaluation of ssCTS design considerations. (a-e) Comparison of different CTS designs with an IL2RA-GFP knock-in construct targeting IL2RA locus assessed by flow cytometry. (a) Comparison of CTS with a gRNA target sequence that is specific for the cognate RNP (+IL2RA CTS), an alternative gRNA sequence (+CD5 CTS), a CTS incorporating a PAM site and scrambled gRNA sequence (+scramble CTS), or an equivalent amount of dsDNA within the 5′ end of the homology arm (+end protection). (b) Comparison of complementary oligos covering varying regions of the CTS and surrounding sequences (design schematics left; knock-in results right). Constructs with CTS sites on both 5′ and 3′ end (green bars), 5′ end only (blue blurs), or 3′ end only (red bars) are shown on the right panel with two best performing designs indicated (right). (c) Evaluation of varied 5′ ends including different length of buffer sequence upstream of the CTS site. (d) Comparison of CTS designs with varying numbers of scrambled bases at the 5′ end of the gRNA target sequence using WT or SpyFi Cas9. (e) Knock-in percentages are shown with varying length of homology arm covered by the complementary oligonucleotide. Each experiment was performed with T cells from 2 independent healthy donors. Error bars indicate standard deviation. All comparisons except for panel b include complementary oligos covering the entire 5′ Buffer+gRNA+PAM+homology arms. CTS=Cas9 Target Site, PAM=Protospacer Adjacent Motif, HDRT=homology-directed-repair template, HA=homology arms.

[0046] FIG. 5 shows the application of ssCTS knock-in templates across diverse target loci, knock-in constructs, and primary human hematopoietic cell types. (a) Knock-in efficiencies for constructs targeting a tNGFR marker to 22 different target genome loci. (b-d) Comparison of large ssDNA and dsDNA HDRTs with CTS sites for knock-in of a pooled library of 2.6-3.6 kb polycistronic constructs targeted to the TRAC locus. Shown for each HDRT variation is (b) relative % knock-in in comparison to maximum for dsDNA+CTS templates, (c) relative knock-in cell count yields in comparison to maximum for dsDNA+CTS templates, and (d) representation of each library member in knock-in cells post-electroporation in comparison to construct representation the input plasmid pool. (e-g) Comparison of knock-in cell yields using ssDNA (red) and dsDNA HDRTs (blue) with CTS sites across a variety of primary human hematopoietic cell types. Note, different cell type comparisons are performed with different blood donors. All comparisons were performed using a knock-in construct generating an CLTA-mCherry fusion at the CLTA locus. Shown for each cell type using HDRT concentrations from 5-160 nM are (e) knock-in cell count yields, (f) maximum fold-change in knock-in count yields (relative to dsCTS templates), and (g) maximum % knock-in. (h) Evaluation of ssCTS templates +/−M3814+TSA (MT) or M3814+TSA+XL413 (MTX) inhibitor combinations with a panel of 44 different knock-in constructs targeting a tNGFR marker across 22 different target loci including genes implicated in Primary Immunodeficiencies (PID) or with potential importance for T cell engineering. 2 gRNAs and corresponding ssCTS templates were used for each gene (g1 and g2). All experiments were performed with T cells from 2 independent healthy donors. Error bars indicate standard deviation. CTS=Cas9 Target Site, HDRT=homology-directed-repair template, tNGFR=truncated Nerve Growth Factor Receptor, dsCTS=dsDNA HDRT+CTS sites, ssCTS=ssDNA HDRT+CTS sites, kb=kilobase, MT=M3814+TSA, MTX=M3814+TSA+XL413.

[0047] FIG. 6 shows the evaluation of small molecule inhibitors to boost knock-in in primary human T cells. (a) Evaluation of relative increase in % knock-in using an ssDNA CD5-HA knock-in construct over varied concentrations of 5 different small molecule inhibitors assessed by flow cytometry. Red bars indicate concentrations chosen for subsequent experiments. (b) Comparison of relative % knock-in (top) and live cell counts (bottom) with small molecule inhibitor combinations. Combinations chosen for subsequent experiments are highlighted in blue (MT) and yellow (MTX). (c) Comparison of dsCTS and ssCTS templates in combination with small molecule inhibitors for 5 different knock-in constructs including a large CD5-HA HDRT (˜2.7 kb), a tNGFR knock-in to the IL2RA gene (˜1.5 kb), an mCherry fusion in the Clathrin gene (˜1.5 kb), a near full length CTLA4-GFP fusion to the CTLA4 gene (˜2.1 kb), and a full length IL2RA-GFP fusion to the IL2RA gene (˜2.3 kb). (d) Evaluation of live cell counts with MT and MTX inhibitor combinations using 44 different knock-in constructs targeting a tNGFR marker across 22 different target loci with 2 gRNA per gene (g1 and g2). Panel a, b, and d were each performed with T cells from 2 independent healthy human blood donors. Panel c was performed with T cells from 4-6 independent healthy human blood donors. Error bars indicate standard deviation. CTS=Cas9 Target Site, HDRT=homology-directed-repair template, dsCTS=dsDNA+CTS HDRT, ssCTS=ssDNA+CTS HDRT, TSA=Trichostatin A, HDR Enhancer=IDT Alt-R HDR Enhancer, MT=M3814+TSA, MTX=M3814+TSA+XL413.

[0048] FIG. 7 shows IL2RA and CTLA4 ORF replacement strategies. (a) Gating for GFP+ cells is shown with WT and S166N IL2RA-GFP knock-in constructs. (b) Diagram of the CTLA4 gene (top), CTLA4 protein levels (bottom), and cutting efficiency (bottom) illustrating a screening panel of 12 gRNAs examined within exon 1 and intron 1. gRNAs were assessed in activated CD4+ T cells for protein disruption by CTLA4 flow cytometric analysis (flow plots and top row of numbers demonstrate the % of CTLA4-negative cells for each donor), and for cutting efficiency as determined by TIDE indel analysis (see Brinkman, E. K. et al. Nucleic acids research 46, e58, doi:10.1093/nar/gky164 (2018). The bottom row of numbers indicate the % indel at target locus. (c) CTLA4 expression levels assessed by flow cytometry with endogenous protein (black) and WT CTLA4-GFP knock-in protein (red) are shown for CD4− T cells, CD4+ T cells, and regulatory T cells with (dotted line) and without (solid line) stimulation. (d) Gating for GFPhi cells is shown for WT, R70W, R75W, and T124P CTLA4-GFP knock-in cells. Each experiment was performed with T cells from 2 independent healthy human blood donors. Error bars indicate standard deviation. WT=Wild-Type, Treg=regulatory T cell.

[0049] FIG. 8 shows whole open reading frame (ORF) replacement at target genes for therapeutic and diagnostic human T cell editing. (a-d) IL2RA exon 1-8 ORF replacement strategy. (a) Diagram of the IL2RA gene with reported patient coding mutations and knock-in strategy using an IL2RA-GFP fusion protein targeted to exon 1. The S166N mutation examined explored in panel c-d is noted. (b) TL2RA and GFP expression in CD4+ T cells electroporated with IL2RA-GFP ssCTS templates and cognate RNP followed by MTX inhibitor combination (green), in comparison to RNP only (red), or no electroporation control cells (blue). (c) Comparison of extracellular (surface staining) and intracellular (staining in permeabilized cells which includes total surface and intracellular protein) IL2RA expression with WT and S166N IL2RA-GFP knock-ins assessed by flow cytometry. Percent IL2RA+ is shown for each panel. (d) Localization of WT and S166N IL2RA-GFP protein by fluorescence microscopy. (e-i) CTLA4 exon 2-4 ORF replacement strategy. (e) Diagram of the CTLA4 gene with reported patient mutations and knock-in strategy using a CTLA4-GFP fusion protein targeted to intron 1. The R70W, R75W, T124P mutations examined in panel g-i are noted. (f) CTLA4 and GFP expression in CD4+ T cells electroporated with CTLA4-GFP ssCTS templates and cognate RNP followed by MTX inhibitor combination (green), in comparison to RNP only (red), or no electroporation control cells (blue). (g) Quantification of percent knock-in for WT, R70W, R75W, and T124P constructs electroporated with ssCTS templates and treated with the MTX inhibitor combination assess by flow cytometry. (h) Structure of CTLA4 dimer with CD80/86 interaction domain highlighted (yellow) along with location of R70W (blue), R75W (orange), and T124P (green) mutations. (i) Comparison of extracellular CTLA4 (surface staining), intracellular CTLA4 (staining in permeabilized cells which includes total surface and intracellular protein), and biotinylated recombinant CD80 ligand interaction stained with Streptavidin-APC in WT, R70W, R75W, and T124P knock-in CD4+ T cells. Each experiment was performed with T cells from 2 independent healthy human blood donors. Error bars indicate standard deviation. RNP=Cas9 Ribonucleoprotein, HDRT=homology-directed-repair template, DAPI=4′,6-diamidino-2-phenylindole nuclear stain, rCD80=recombinant CD80.

[0050] FIG. 9 shows a GMP-compatible process for non-viral CAR-T cell manufacturing. (a) Diagram of non-viral CAR-T cell manufacturing process. T cells are isolated from peripheral blood and activated on Day 0 with anti-CD3/anti-CD28 Dynabeads, IL-7, and IL-15. Cells are electroporated using the Maxcyte GTx electroporator on Day 2 with Cas9 RNPs+ ssCTS HDRTs and then expanded for an additional 7-10 days using G-Rex 100M culture vessels supplemented with IL-7+IL-15. (b) Representative Day 10 flow plots showing BCMA-CAR knock-in for Control (No inhibitors), M3814, and M3814+TSA (MT) conditions. (c) BCMA-CAR knock-in rates on Day 7 and Day 10 for each condition. (d) Absolute number of CAR+ cells on Day 7 and Day 10. Dotted line shows an estimated patient dose of ˜100×10⁶ CAR+ T cells. (e) T cell immunophenotype on Day 10 based on CD45RA and CD62L expression. (f) In vitro killing of BCMA+ MM1S multiple myeloma cell lines in comparison to unmodified T cells from same blood donors. Each experiment was performed with T cells from 2 independent healthy human blood donors. Error bars indicate standard deviation. Panel a was generated in part using graphics created by Biorender.com. RNP=Ribonucleoprotein, CTS=Cas9 Target Site, ssCTS=ssDNA HDRT+CTS sites, HDRT=homology-directed-repair template, M=M3814, MT=M3814+TSA, Tscm=T stem cell memory, Tcm=T central memory, Tm=T effector memory, Teff=T effector.

[0051] FIG. 10 shows non-viral CAR-T development with GMP-compatible reagents and equipment. (a) Comparison of Genscript HDRTs with internally generated HDRTs for both ssCTS (top) and dsCTS templates (bottom). Shown for each are % knock-in, live cell counts, and knock-in cell counts in comparison to internally generated ssDNA or dsDNA controls, respectively. (b) Flow plots for T cell immunophenotype analysis based on CD45RA and CD62L expression at Day 7 and Day 10 post-activation. (c) Gating strategy for extended flow cytometric analysis demonstrating CD45RA+CD62L+CD45RO-CCR7+CD95+ population immunophenotypically consistent with a Tscm population. (d) Live cell counts for large-scale GMP-compatible manufacturing process at Day 7 and Day 10 post-activation. Each experiment was performed with T cells from 2 independent healthy human blood donors. Error bars indicate standard deviation. RNP=Ribonucleoprotein, CTS=Cas9 Target Site, dsCTS=dsDNA HDRT+CTS sites, ssCTS=ssDNA HDRT+CTS sites, HDRT=homology-directed-repair template, M=M3814, MT=M3814+TSA, MTX=M3814+TSA+XL413.

[0052] FIG. 11 shows an evaluation of CD25 (IL2RA) protein knockout in T cells electroporated with RNPs with and without inhibitors M3814 and trichostatin A (TSA).

[0053] FIG. 12 shows insertion-deletion Tracking of Indels by Decomposition (TIDE) analysis in T cells electroporated with RNPs targeting IL2RA with or without M3814 and TSA.

[0054] FIG. 13 shows the sequence of amplicons analyzed by TIDE in FIG. 12. Figure discloses SEQ ID NOS 449-450, respectively, in order of appearance.

[0055] FIG. 14 shows an evaluation of T cell receptor protein knock in T cells electroporated with RNPs with and without inhibitors M3814 and trichostatin A.

[0056] FIG. 15 shows insertion-deletion Tracking of Indels by Decomposition (TIDE) analysis in T cells electroporated with RNPs targeting TRAC with or without M3814 and TSA.

[0057] FIG. 16 shows the sequence of amplicons analyzed by TIDE in FIG. 15. Figure discloses SEQ ID NOS 451-452, respectively, in order of appearance.

[0058] FIG. 17 shows the effects of small molecule combinations on homology directed repair kinetics and efficiency.

### DETAILED DESCRIPTION OF THE INVENTION

[0059] CRISPR-Cas9 offers unprecedented opportunities to modify genome sequences in primary human cells to study disease variants and reprogram cell functions for next-generation cellular therapies. CRISPR has several potential advantages over widely used retroviral vectors including: 1) site-specific transgene insertion via homology directed repair (HDR), and 2) reductions in the cost and complexity of genome modification. Despite rapid progress with ex vivo CRISPR genome engineering, many novel research and clinical applications would be enabled by methods to further improve knock-in efficiency and the absolute yield of live knock-in cells, especially with large HDR templates (HDRT). We recently reported that Cas9 target sequences (CTS) could be introduced into double-stranded DNA (dsDNA) HDRTs to improve knock-in, but yields and efficiencies were limited by toxicity at high HDRT concentrations. Here we developed a novel system that takes advantage of lower toxicity with single-stranded DNA (ssDNA). We designed hybrid ssDNA HDRTs that incorporate CTS sites and were able to boost knock-in percentages by >5-fold and live cell yields by >7-fold relative to dsDNA HDRTs with CTS. Knock-in efficiency and yield with ssCTS HDRTs were increased further with small molecule inhibitor combinations to improve HDR. We demonstrate application of these methods across a variety of target loci, knock-in constructs, and primary human cell types to reach ultra-high HDR efficiencies (>80-90%) which we use for pathogenic gene variant modeling and universal gene replacement strategies for IL2RA and CTLA4 mutations associated with mendelian immune disorders. Finally, we develop a GMP-compatible method for fully non-viral CAR-T cell manufacturing, demonstrating knock-in efficiencies of 46-62% and generating yields of >1.5×10⁹ CAR+ T cells, well above current doses for adoptive cellular therapies. Taken together, we present a comprehensive non-viral approach to model disease associated mutations and re-write targeted genome sequences to program immune cell therapies at a scale compatible with future clinical application.

### I. Methods for Genomic Editing

[0060] Provided herein are methods for editing the genome of a cell, such as a human T cell or a hematopoietic stem cell. The methods include inserting a nucleic acid sequence of an exogenous partial open reading frame (ORF) of an autosomal dominant gene into an intronic target region of an endogenous autosomal dominant gene in the cell, wherein:
[0061] the endogenous autosomal dominant gene comprises one or more disease-causing mutations,
[0062] the exogenous partial ORF of the autosomal dominant gene is free of disease-causing mutations, and
[0063] insertion of the exogenous partial ORF of the autosomal dominant gene into the intronic target region results in a modified autosomal dominant gene that encodes a protein which is free of disease-causing mutations.

[0064] In alternative embodiments, the methods include inserting a nucleic acid sequence of an exogenous partial open reading frame (ORF) of an autosomal dominant gene into an intronic target region of an endogenous autosomal dominant gene in the cell, wherein:
[0065] the endogenous autosomal dominant gene is free of mutations (e.g., disease causing mutations),
[0066] the exogenous partial ORF of the autosomal dominant gene comprises one or more mutations (e.g., disease-causing mutations), and
[0067] insertion of the exogenous partial ORF of the autosomal dominant gene into the intronic target region results in a modified autosomal dominant gene that encodes a protein which contains the mutations. Cells resulting from such methods can be used, for example, in functional screens for elucidation of disease etiology.

[0068] Examples of autosomal dominant genes include, but are not limited to, 11q23del, ACD, ACTB, ADAM17, AICDA, AIRE, APOL1, BACH2, BCL11B, C1R, CIS, C3, CARD11, CARD14, CASP10, CD46, CFB, CFH, CFHR1, CFHR2, CFHR3, CFHR4, CFHR5, CHD7, COPA, CXCR4, Del10p13-p14, ELANE, ERBB2IP, FADD, FERMT3, FNGR1, FOXN1, GATA2, GFI1, IFIH1, IKBKB, IKZF1, IL17F, IRF2BP2, IRF3, IRF4, IRF8, ITGB2, JAK1, KMT2A, KMT2D, MAD2L2, MEFV, NCSTN, NFATS, NFKB1, NFKB2, NFKBIA, NLRC4, NLRP1, NLRP3, NLRP3, NLRP12, NOD2, OAS1, PIK3CD, PIK3R1, PLCG2, POLR3A, POLR3C, POLR3F, PSEN, PSENEN, PSMB8, PSTPIP1, PTEN, RAC2, RAD51, RAD51C, RELA, RPSA, RTEL1, SAMD9, SAMD9L, SEC61A1, SEMA3E, SERPING1, SH3BP2, SLC35C1, SRP54, SRP72, STAT1, STAT3, STAT5b, STXBP2, TBK1, TBX1, TCF3, TERC, TERT, TGFBR1, TGFBR2, THBD, TIMCAM1, TINF2, TLR3, TNFAIP, TNFRSF13B, TNFRSF1A, TNFRSF6, TNFS12, TOP2B, TP53, and TRAF3. Any intronic region of such genes may be targeted for insertion in the methods of the present disclosure.

[0069] In some embodiments, the autosomal dominant gene is CTLA4, and insertion of an exogenous CLTA4 partial ORF into the intronic target region of an endogenous CLTA4 gene results in a modified CTLA4 gene that encodes a CTLA4 protein which is free of disease-causing mutations.

[0070] In some embodiments, the intronic target region is in intron 1 of the endogenous CTLA4 gene and the exogenous CTLA4 partial ORF comprises exons 2-4 of CTLA4. For example, the intronic target region may be at chr2:203,868,052-203,870,585 in hg38 genome assembly. In some embodiments, the partial ORF is inserted at chr2:203,870,312.

[0071] In some embodiments, the nucleic acid sequence of the exogenous partial ORF of the autosomal dominant gene (e.g., CTLA4) is inserted into the intronic target region by introducing into the cell: (a) a targeted nuclease that creates an insertion site in the intronic target region; (b) a guide RNA that specifically hybridizes to the intronic target region; and (c) a DNA template comprising the nucleic acid sequence of the exogenous partial ORF.

[0072] In some embodiments, the DNA template comprises a single-stranded DNA polynucelotide (also referred to as a homology directed repair template; ssHDRT) and one or more nuclease binding sequences, wherein at least one nuclease binding sequence forms a double-stranded duplex with a complementary polynucleotide sequence. The template may contain a linear or circular ssDNA. In some embodiments, the DNA template is formed from a single polynucleotide molecule. In some embodiments, the DNA template is formed from two or more polynucleotide molecules. Various template constructs may be employed including, but not limited to, a primer construct, a mixed chain construct, a half loop construct, a hairpin construct, a hairpin/primer construct, a mixed loop construct, a cap construct, and a double hairpin construct, as described in International Pat. Appl. No. PCT/US2021/022058, which is incorporated herein by reference in its entirety. In some embodiments, the DNA template comprises a double-stranded DNA polynucleotide or a viral template such as an adenovirus associated vector (AAV).

[0073] In some embodiments:
[0074] the DNA template is a single-stranded DNA template,
[0075] the 5′ end and the 3′ end of the DNA template comprise nucleotide sequences that are homologous to genomic sequences flanking the intronic target region,
[0076] the DNA template further comprises a nuclease binding sequence, wherein the nuclease binding sequence forms a double-stranded duplex with a complementary nucleotide sequence.

### A. Primer Template Constructs

[0077] In some embodiments, the double-stranded duplex is formed between the nuclease binding sequence and an oligonucleotide or polynucleotide comprising the complementary nucleotide sequence. Template constructs containing such oligonucleotides are also referred to herein as “primer constructs” or “primer template constructs.” In general, a primer construct contains a linear, single stranded DNA template and one or two double-stranded duplex regions formed from two complementary nuclease binding sequences (also referred to as DNA-binding protein target sequences or Cas9 target sequences; CTSs). In some embodiments, the donor template contains one ssHDRT and one nuclease binding sequence. In other embodiments, the donor template contains one ssHDRT and two nuclease binding sequences. Each nuclease binding sequence forms a double-stranded duplex with a complementary polynucleotide sequence, which typically does not extend into the ssHDRT sequence. In some embodiments, the template construct can contain two polynucleotide molecules, in which one polynucleotide molecule contains a template that has one ssHDRT and one nuclease binding sequence and the second polynucleotide molecule contains a complementary polynucleotide sequence. In some embodiments, the template construct can contain three polynucleotide molecules, in which the first polynucleotide molecule contains a template that has one ssHDRT and one nuclease binding sequence and each of the second and third polynucleotide molecules contains a complementary polynucleotide sequence. The nuclease binding sequence can be located at or proximal to the 5′ and/or 3′ terminus of the donor template. Exemplary ssHDRT sequences that can be used in the compositions and methods described herein are elisted under “SEQUENCES” at the end of the application, and optionally include the listed 5′, 3′ or both 5′ and 3′ CTS sequences listed below.

[0078] In some embodiments, the DNA template has the sequence:

(SEQ ID NO: 1)
CTATtgacaaacagaagaccCGGTACAGTGCATCAAGACACAGCTACTC
CTGGGTGACAGAGGTTCAGGGCCAGCTCACTAAGTAGGCAGAAGTTTTT
GACATATACTTTGAGAGATAAAGCAAGATTCTGTACCTCAACCTTCAGA
ATTTCCCCTACCACTCATTATAGTTCCGGAGCTATATAGCTCCTATCAT
TCTatcataaccttagaataccagagaacatatcatctcatctaattat
ctcttactatatgtgaaaaaaatgaaggacatgggggaagtgtgacttg
ccccaaatcacatatttcatggtagagggCTGGGCTTGGCCATGAAGGA
GCATGAGTTCACTGAGTTCCCTTTGGCTTTTCCATGCTAGCAATGCACG
TGGCCCAGCCTGCTGTGGTACTGGCCAGCAGCCGAGGCATCGCCAGCTT
TGTGTGTGAGTATGCATCTCCAGGCAAAGCCACTGAGGTCCGGGTGACA
GTGCTTCGGCAGGCTGACAGCCAGGTGACTGAAGTCTGTGCGGCAACCT
ACATGATGGGGAATGAGTTGACCTTCCTAGATGATTCCATCTGCACGGG
CACCTCCAGTGGAAATCAAGTGAACCTCACTATCCAAGGACTGAGGGCC
ATGGACACGGGACTCTACATCTGCAAGGTGGAGCTCATGTACCCACCGC
CATACTACCTGGGCATAGGCAACGGAACCCAGATTTATGTAATTGATCC
AGAACCGTGCCCAGATTCTGACTTCCTCCTCTGGATCCTTGCAGCAGTT
AGTTCGGGGTTGTTTTTTTATAGCTTTCTCCTCACAGCTGTTTCTTTGA
GCAAAATGCTAAAGAAAAGAAGCCCTCTTACAACAGGGGTCTATGTGAA
AATGCCCCCAACAGAGCCAGAATGTGAAAAGCAATTTCAGCCTTATTTT
ATTCCCATCAATGGATCTGGAGGAACTAGCGGCAGCAAGGGCGAGGAGC
TGTTCACCGGGGTGGTGCCCATCCTGGTCGAGCTGGACGGCGACGTAAA
CGGCCACAAGTTCAGCGTGCGCGGCGAGGGCGAGGGCGATGCCACCAAC
GGCAAGCTGACCCTGAAGTTCATCTGCACCACCGGCAAGCTGCCCGTGC
CCTGGCCCACCCTCGTGACCACCCTGACCTACGGCGTGCAGTGCTTCAG
CCGCTACCCCGACCACATGAAGCGCCACGACTTCTTCAAGTCCGCCATG
CCCGAAGGCTACGTCCAGGAGCGCACCATCAGCTTCAAGGACGACGGCA
CCTACAAGACCCGCGCCGAGGTGAAGTTCGAGGGCGACACCCTGGTGAA
CCGCATCGAGCTGAAGGGCATCGACTTCAAGGAGGACGGCAACATCCTG
GGGCACAAGCTGGAGTACAACTTCAACAGCCACAACGTCTATATCACCG
CCGACAAGCAGAAGAACGGCATCAAGGCCAACTTCAAGATCCGCCACAA
CGTGGAGGACGGCAGCGTGCAGCTCGCCGACCACTACCAGCAGAACACC
CCCATCGGCGACGGCCCCGTGCTGCTGCCCGACAACCACTACCTGAGCA
CCCAGTCCGTGCTGAGCAAAGACCCCAACGAGAAGCGCGATCACATGGT
CCTgCTGGAgTTCGTGACCGCCGCCGGGATCACTTGAcaccgggtcttc
aacttgtttattgcagcttataatggttacaaataaagcaatagcatca
caaatttcacaaataaagcatttttttcactgcattctagttgtggttt
gtccaaactcatcaatgtatcttatcatgtctggaagacctgtttacct
cttctgtttgtcatatcagtgttcttcctgccacaaccatcttgAAGAA
TCTATTTCTCAGTAAGAAAATATCTTTATGGAGAGTAGCTGGAAAACAG
TTGAGAGATGGAGGGGAGGCTGGGGGTGTGGAGAGGGGAAGGGGTAAGT
GATAGATTCGTTGAAGGGGGGAGAAAAGGCCGTGGGGATGAAGCTAGAA
GGCAGAAGGGCTCCGggtcttctgtttgtcaATAG.

[0079] In some embodiments, the primer construct contains one or both of the following complementary nuclease binding sequences:

(SEQ ID NO: 2; CTLA4 ssCTS left primer)
CTGTGTCTTGATGCACTGTACCGGGTCTTCTGTTTGTCAATAG
(SEQ ID NO: 3; CTLA4 ssCTS right primer)
CTATtgacaaacagaagaccCGGAGCCCTTCTGCCTTCTAG.

[0080] In some embodiments, the DNA template further includes a protospacer adjacent motif (PAM) sequence. The Cas9 protein identifies the target nucleic acid by first identifying a 3-base pair PAM located 3′ of the target nucleic acid. Once the PAM is identified, the target gRNA in the RNP complex hybridizes to the target nucleic acid upstream of the PAM. The DNA template can further contain one or more edge sequences at either or both of the 5′ and 3′ termini of the template. An edge sequence in the donor template can facilitate binding between the donor template and the DNA-binding protein (e.g., an RNA-guided nuclease). In some embodiments, an edge sequence can have at least 2 nucleotides, e.g., between 2 and 24 nucleotides (e.g., between 2 and 22, between 2 and 20, between 2 and 18, between 2 and 16, between 2 and 14, between 2 and 12, between 2 and 10, between 2 and 8, between 2 and 6, between 2 and 4, between 4 and 24, between 6 and 24, between 8 and 24, between 10 and 24, between 12 and 24, between 14 and 24, between 16 and 24, between 18 and 24, between 20 and 24, or between 22 and 24 nucleotides; 2, 3, 4, 5, 6, 7, 8, 9, 10, 11, 12, 13, 14, 15, 16, 17, 18, 19, 20, 21, 22, 23, or 24 nucleotides).

[0081] In some embodiments, the size or length of the donor template is greater than about 200 bp, 250 bp, 300 bp, 350 bp, 400 bp, 450 bp, 500 bp, 550 bp, 600 bp, 650 bp, 700 bp, 750 bp, 800 bp, 850 bp, 900 bp, 1 kb, 1.1 kb, 1.2 kb, 1.3 kb, 1.4 kb, 1.5 kb, 1.6 kb, 1.7 kb, 1.8 kb, 1.9 kb, 2.0 kb, 2.1 kb, 2.2 kb, 2.3 kb, 2.4 kb, 2.5 kb, 2.6 kb, 2.7 kb, 2.8 kb, 2.9 kb, 3 kb, 3.1 kb, 3.2 kb, 3.3 kb, 3.4 kb, 3.5 kb, 3.6 kb, 3.7 kb, 3.8 kb, 3.9 kb, 4.0 kb, 4.1 kb, 4.2 kb, 4.3 kb, 4.4 kb, 4.5 kb, 4.6 kb, 4.7 kb, 4.8 kb, 4.9 kb, 5.0 kb, 5.1 kb, 5.2 kb, 5.3 kb, 5.4 kb, 5.5 kb, 5.6 kb, 5.7 kb, 5.8 kb, 5.9 kb, 6.0 kb, 6.1 kb, 6.2 kb, 6.3 kb, 6.4 kb, 6.5 kb, 6.6 kb, 6.7 kb, 6.8 kb, 6.9 kb, 7.0 kb, 7.1 kb, 7.2 kb, 7.3 kb, 7.4 kb, 7.5 kb, 7.6 kb, 7.7 kb, 7.8 kb, 7.9 kb, 8.0 kb, 8.1 kb, 8.2 kb, 8.3 kb, 8.4 kb, 8.5 kb, 8.6 kb, 8.7 kb, 8.8 kb, 8.9 kb, 9.0 kb, 9.1 kb, 9.2 kb, 9.3 kb, 9.4 kb, 9.5 kb, 9.6 kb, 9.7 kb, 9.8 kb, 9.9 kb, 10.0 kb, any size of template in between these sizes, or greater than 10 kb. For example, the size of the template can be about 200 bp to about 500 bp, about 200 bp to about 750 bp, about 200 bp to about 1 kb, about 200 bp to about 1.5 kb, about 200 bp to about 2.0 kb, about 200 bp to about 2.5 kb, about 200 bp to about 3.0 kb, about 200 bp to about 3.5 kb, about 200 bp to about 4.0 kb, about 200 bp to about 4.5 kb, about 200 bp to about 5.0 kb.

### B. Guide RNA

[0082] As used throughout, a guide RNA (gRNA) sequence is a sequence that interacts with a site-specific or targeted nuclease and specifically binds to or hybridizes to a target nucleic acid within the genome of a cell, such that the gRNA and the targeted nuclease co-localize to the target nucleic acid in the genome of the cell. Each gRNA includes a DNA targeting sequence or protospacer sequence of about 10 to 50 nucleotides in length that specifically binds to or hybridizes to a target DNA sequence in the genome. For example, the DNA targeting sequence is about 10, 11, 12, 13, 14, 15, 16, 17, 18, 19, 20, 21, 22, 23, 24, 25, 26, 27, 28, 29, 30, 31, 32, 33, 34, 35, 36, 37, 38, 39, 40, 41, 42, 43, 44, 45, 46, 47, 48, 49, or 50 nucleotides in length. In some embodiments, the gRNA comprises a crRNA sequence and a transactivating crRNA (tracrRNA) sequence. In some embodiments, the gRNA does not comprise a tracrRNA sequence. In some embodiments, the guide sequence for targeting of CTLA-4 is GATATGACAAACAGAAGACC (SEQ ID NO:4). The guide sequence can be used in a single-guide RNA (sgRNA) as described below, or in a split crRNA+tracrRNA construct. In some embodiments, the tracrRNA sequence is AACAGCAUAGCAAGUUAAAAUAAGGCUAGUCCGUUAUCAACUUGAAAAAGUGGC ACCGAGUCGGUGCUUUUUUU (SEQ ID NO:5). In some embodiments, the gRNA comprises one of the sequences listed in Table 3 or Table A, targeting the gene designated in the Tables for each gRNA.

[0083] In some embodiments, the targeted nuclease (e.g., a Cas protein) is guided to its target DNA by a single-guide RNA (sgRNA). An sgRNA is a version of the naturally occurring two-piece guide RNA (crRNA and tracrRNA) engineered into a single, continuous sequence. An sgRNA typically contains (1) a guide sequence (e.g., the crRNA equivalent portion of the sgRNA) that targets the Cas protein to the target DNA, and (2) a scaffold sequence that interacts with a nuclease such as a Cas protein (e.g., the tracrRNAs equivalent portion of the sgRNA). An sgRNA may be selected using a software. As a non-limiting example, considerations for selecting an sgRNA can include, e.g., the PAM sequence for the Cas9 protein to be used, and strategies for minimizing off-target modifications. Tools such as NUPACK® and the CRISPR Design Tool can provide sequences for preparing the sgRNA, for assessing target modification efficiency, and/or assessing cleavage at off-target sites.

[0084] The guide sequence in the sgRNA may be complementary to a specific sequence within a target DNA. The 3′ end of the target DNA sequence can be followed by a PAM sequence. Approximately 20 nucleotides upstream of the PAM sequence is the target DNA. In general, a Cas9 protein or a variant thereof cleaves about three nucleotides upstream of the PAM sequence. The guide sequence in the sgRNA can be complementary to either strand of the target DNA.

[0085] In some embodiments, the guide sequence of an sgRNA may comprise about 10 to about 2000 nucleic acids, for example, about 10 to about 100 nucleic acids, about 10 to about 500 nucleic acids, about 10 to about 1000 nucleic acids, about 10 to about 1500 nucleic acids, about 10 to about 2000 nucleic acids, about 50 to about 100 nucleic acids, about 50 to about 500 nucleic acids, about 50 to about 1000 nucleic acids, about 50 to about 1500 nucleic acids, about 50 to about 2000 nucleic acids, about 100 to about 500 nucleic acids, about 100 to about 1000 nucleic acids, about 100 to about 1500 nucleic acids, about 100 to about 2000 nucleic acids, about 500 to about 1000 nucleic acids, about 500 to about 1500 nucleic acids, about 500 to about 2000 nucleic acids, about 1000 to about 1500 nucleic acids, about 1000 to about 2000 nucleic acids, or about 1500 to about 2000 nucleic acids at the 5′ end of the sgRNA that can direct the Cas protein to the target DNA site using RNA-DNA complementarity base pairing. In some embodiments, the guide sequence of an sgRNA comprises about 100 nucleic acids at the 5′ end of the sgRNA that can direct the Cas protein to the target DNA site using RNA-DNA complementarity base pairing. In some embodiments, the guide sequence comprises 20 nucleic acids at the 5′ end of the sgRNA that can direct the Cas protein to the target DNA site using RNA-DNA complementarity base pairing. In other embodiments, the guide sequence comprises less than 20, e.g., 19, 18, 17, 16, 15 or less, nucleic acids that are complementary to the target DNA site. In some instances, the guide sequence in the sgRNA contains at least one nucleic acid mismatch in the complementarity region of the target DNA site. In some instances, the guide sequence contains about 1 to about 10 nucleic acid mismatches in the complementarity region of the target DNA site.

[0086] The scaffold sequence in the sgRNA may serve as a protein-binding sequence that interacts with the Cas protein or a variant thereof. In some embodiments, the scaffold sequence in the sgRNA can comprise two complementary stretches of nucleotides that hybridize to one another to form a double-stranded RNA duplex (dsRNA duplex). The scaffold sequence may have structures such as lower stem, bulge, upper stem, nexus, and/or hairpin. In some embodiments, the scaffold sequence in the sgRNA can be between about 90 nucleic acids to about 120 nucleic acids, e.g., about 90 nucleic acids to about 115 nucleic acids, about 90 nucleic acids to about 110 nucleic acids, about 90 nucleic acids to about 105 nucleic acids, about 90 nucleic acids to about 100 nucleic acids, about 90 nucleic acids to about 95 nucleic acids, about 95 nucleic acids to about 120 nucleic acids, about 100 nucleic acids to about 120 nucleic acids, about 105 nucleic acids to about 120 nucleic acids, about 110 nucleic acids to about 120 nucleic acids, or about 115 nucleic acids to about 120 nucleic acids.

### C. Targetable Nuclease

[0087] As described above, in some embodiments of the compositions and methods described herein, the targetable nuclease is an RNA-guided nuclease (e.g., a Cas protein). The targetable nuclease can recognize a sequence of a target nucleic acid (e.g., a target gene within a genome), bind to the target nucleic acid, and modify the target nucleic acid. In other embodiments, the targetable nuclease can be a fusion protein that includes a protein that can bind to the target nucleic acid and a protein that can modify the target nucleic acid (e.g., a nuclease, a transcription activator or repressor).

[0088] In some embodiments, the targetable nuclease has nuclease activity. For example, the targetable nuclease can modify the target nucleic acid by cleaving the target nucleic acid. The cleaved target nucleic acid can then undergo homologous recombination with a nearby a homology directed repair (HDR) template. For example, the Cas nuclease can direct cleavage of one or both strands at a location in a target nucleic acid. Non-limiting examples of Cas nucleases include Cas1, Cas1B, Cas2, Cas3, Cas4, Cas5, Cas6, Cas7, Cas8, Cas9 (also known as Csn1 and Csx12), Cas10, Csy1, Csy2, Csy3, Cse1, Cse2, Csc1, Csc2, Csa5, Csn2, Csm2, Csm3, Csm4, Csm5, Csm6, Cmr1, Cmr3, Cmr4, Cmr5, Cmr6, Csb1, Csb2, Csb3, Csx17, Csx14, Csx10, Csx16, CsaX, Csx3, Csx1, Csx15, Csf1, Csf2, Csf3, Csf4, Cpf1, homologs thereof, variants thereof, mutants thereof, and derivatives thereof. There are three main types of Cas nucleases (type I, type II, and type III), and 10 subtypes including 5 type I, 3 type II, and 2 type III proteins (see, e.g., Hochstrasser and Doudna, Trends Biochem Sci, 2015:40(1):58-66). Type II Cas nucleases include Cas1, Cas2, Csn2, Cas9, and Cfp1. These Cas nucleases are known to those skilled in the art. For example, the amino acid sequence of the Streptococcus pyogenes wild-type Cas9 polypeptide is set forth, e.g., in NBCI Ref. Seq. No. NP_269215, and the amino acid sequence of Streptococcus thermophilus wild-type Cas9 polypeptide is set forth, e.g., in NBCI Ref Seq. No. WP_011681470.

[0089] Cas nucleases, e.g., Cas9 nucleases, can be derived from a variety of bacterial species including, but not limited to, Veillonella atypical, Fusobacterium nucleatum, Filifactor alocis, Solobacterium moorei, Coprococcus catus, Treponema denticola, Peptoniphilus duerdenii, Catenibacterium mitsuokai, Streptococcus mutans, Listeria innocua, Staphylococcus pseudintermedius, Acidaminococcus intestine, Olsenella uli, Oenococcus kitaharae, Bifidobacterium bifidum, Lactobacillus rhamnosus, Lactobacillus gasseri, Finegoldia magna, Mycoplasma mobile, Mycoplasma gallisepticum, Mycoplasma ovipneumoniae, Mycoplasma canis, Mycoplasma synoviae, Eubacterium rectale, Streptococcus thermophilus, Eubacterium dolichum, Lactobacillus coryniformis subsp. Torquens, Ilyobacter polytropus, Ruminococcus albus, Akkermansia muciniphila, Acidothermus cellulolyticus, Bifidobacterium longum, Bifidobacterium dentium, Corynebacterium diphtheria, Elusimicrobium minutum, Nitratifractor salsuginis, Sphaerochaeta globus, Fibrobacter succinogenes subsp. Succinogenes, Bacteroides fragilis, Capnocytophaga ochracea, Rhodopseudomonas palustris, Prevotella micans, Prevotella ruminicola, Flavobacterium columnare, Aminomonas paucivorans, Rhodospirillum rubrum, Candidatus Puniceispirillum marinum, Verminephrobacter eiseniae, Ralstonia syzygii, Dinoroseobacter shibae, Azospirillum, Nitrobacter hamburgensis, Bradyrhizobium, Wolinella succinogenes, Campylobacter jejuni subsp. Jejuni, Helicobacter mustelae, Bacillus cereus, Acidovorax ebreus, Clostridium perfringens, Parvibaculum lavamentivorans, Roseburia intestinalis, Neisseria meningitidis, Pasteurella multocida subsp. Multocida, Sutterella wadsworthensis, proteobacterium, Legionella pneumophila, Parasutterella excrementihominis, Wolinella succinogenes, and Francisella novicida.

[0090] Cas9 protein refers to an RNA-guided double-stranded DNA-binding nuclease protein or nickase protein. Wild-type Cas9 nuclease has two functional domains, e.g., RuvC and HNH, that cut different DNA strands. Cas9 can induce double-strand breaks in genomic DNA (target DNA) when both functional domains are active. The Cas9 enzyme can comprise one or more catalytic domains of a Cas9 protein derived from bacteria belonging to the group consisting of Corynebacter, Sutterella, Legionella, Treponema, Filifactor, Eubacterium, Streptococcus, Lactobacillus, Mycoplasma, Bacteroides, Flaviivola, Flavobacterium, Sphaerochaeta, Azospirillum, Gluconacetobacter, Neisseria, Roseburia, Parvibaculum, Staphylococcus, Nitratifractor, and Campylobacter. In some embodiments, the Cas9 can be a fusion protein, e.g., the two catalytic domains are derived from different bacteria species.

[0091] In some embodiments, a Cas protein can be a Cas protein variant. For example, useful variants of the Cas9 nuclease can include a single inactive catalytic domain, such as a RuvC- or HNH⁻ enzyme or a nickase. A Cas9 nickase has only one active functional domain and can cut only one strand of the target DNA, thereby creating a single strand break or nick. In some embodiments, the Cas9 nuclease can be a mutant Cas9 nuclease having one or more amino acid mutations. For example, the mutant Cas9 having at least a D10A mutation is a Cas9 nickase. In other embodiments, the mutant Cas9 nuclease having at least a H840A mutation is a Cas9 nickase. Other examples of mutations present in a Cas9 nickase include, without limitation, N854A and N863A. A double-strand break can be introduced using a Cas9 nickase if at least two DNA-targeting RNAs that target opposite DNA strands are used. A double-nicked induced double-strand break can be repaired by NHEJ or HDR (Ran et al., 2013, Cell, 154:1380-1389). Non-limiting examples of Cas9 nucleases or nickases are described in, for example, U.S. Pat. Nos. 8,895,308; 8,889,418; and 8,865,406 and U.S. Application Publication Nos. 2014/0356959, 2014/0273226 and 2014/0186919. The Cas9 nuclease or nickase can be codon-optimized for the target cell or target organism.

[0092] In some embodiments, a Cas protein variant that lacks cleavage (e.g., nickase) activity. A Cas protein variant may contain one or more point mutations that eliminates the protein's nickase activity. In some embodiments, such Cas protein variants can be fused to other proteins and serve as targeting domains to direct the other proteins to the target nucleic acid. For example, Cas protein variants without nickase activity may be fused to transcriptional activation or repression domains to control gene expression (Ma et al., Protein and Cell, 2(11):879-888, 2011; Maeder et al., Nature Methods, 10:977-979, 2013; and Konermann et al., Nature, 517:583-588, 2014). A Cas protein variant that lacks nickase activity may be used to target genomic regions, resulting in RNA-directed transcriptional control. In some embodiments, a Cas protein variant without any cleavage (e.g., nickase) activity may be used to target an exogenous protein to the target nucleic acid. An exogenous protein may be fused to the Cas protein variant and the fusion protein may be enhanced by the addition of the anionic polymer. An exogenous protein may be an effector protein domain. An exogenous protein may be a transcription activator or repressor. Other examples of exogenous proteins include, but are not limited to, VP64-p65-Rta (VPR), VP64, P65, Krab, Ten-eleven translocation methylcytosine dioxygenase (TET), and DNA methyltransferase (DNMT). Specific Cas protein variants that lack cleavage (e.g., nickase) activity are also described below.

[0093] In some embodiments, the Cas nuclease can be a high-fidelity or enhanced specificity Cas9 polypeptide variant with reduced off-target effects and robust on-target cleavage. Non-limiting examples of Cas9 polypeptide variants with improved on-target specificity include the SpCas9 (K855A), SpCas9 (K810A/K1003A/R1060A) (also referred to as eSpCas9(1.0)), and SpCas9 (K848A/K1003A/R1060A) (also referred to as eSpCas9(1.1)) variants described in Slaymaker et al., Science, 351(6268):84-8 (2016), and the SpCas9 variants described in Kleinstiver et al., Nature, 529(7587):490-5 (2016) containing one, two, three, or four of the following mutations: N497A, R661A, Q695A, and Q926A (e.g., SpCas9-HF1 contains all four mutations).

[0094] In some embodiments, a targetable nuclease can also be a fusion protein that contains a protein that can bind to the target nucleic acid and a protein that can cleave the target nucleic acid. For example, a protein that can recognize and bind to the target nucleic acid can be a Cas protein variant without any cleavage activity. A Cas protein variant without any cleavage activity can be a Cas9 polypeptide that contains two silencing mutations of the RuvC1 and HNH nuclease domains (D10A and H840A), which is referred to as dCas9 (Jinek et al., Science, 2012, 337:816-821; Qi et al., Cell, 152(5):1173-1183). In one embodiment, the dCas9 polypeptide from Streptococcus pyogenes comprises at least one mutation at position D10, G12, G17, E762, H840, N854, N863, H982, H983, A984, D986, A987 or any combination thereof. Descriptions of such dCas9 polypeptides and variants thereof are provided in, for example, International Patent Publication No. WO 2013/176772. The dCas9 enzyme can contain a mutation at D10, E762, H983, or D986, as well as a mutation at H840 or N863. In some instances, the dCas9 enzyme can contain a D10A or D10N mutation. Also, the dCas9 enzyme can contain a H840A, H840Y, or H840N. In some embodiments, the dCas9 enzyme can contain D10A and H840A; D10A and H840Y; D10A and H840N; DION and H840A; DION and H840Y; or DION and H840N substitutions. The substitutions can be conservative or non-conservative substitutions to render the Cas9 polypeptide catalytically inactive and able to bind to target DNA.

[0095] In other embodiments, a protein that can recognize and bind to the target nucleic acid can be a transcription activator-like (TAL) effector DNA-binding protein or a zinc finger DNA-binding protein. The TAL effector DNA-binding protein has a central domain of DNA-binding tandem repeats usually containing 33-35 amino acids in length and two hypervariable amino acid residues at positions 12 and 13 that can recognize one or more specific DNA base pairs. The zinc finger DNA-binding protein has a DNA-binding motif that is often characterized by the absence or presence one or more zinc ions in order to coordinate and stabilize the motif fold. The zinc finger DNA-binding protein contains multiple finger-like protrusions that make tandem contacts with their target molecule. Some zinc finger DNA-binding proteins also form salt bridges to stabilize the finger-like folds. They were first identified as a DNA-binding motif in transcription factor TFIIIA from Xenopus laevis (African clawed frog), however they are now recognized to bind DNA, RNA, protein, and/or lipid substrates.

[0096] In some embodiments, a targetable nuclease in the compositions and methods described herein can be a fusion protein containing a TAL effector DNA-binding protein and a protein that can cleave the target nucleic acid (also referred to as “Transcription activator-like effector nucleases (TALEN)”). In other embodiments, a targetable nuclease in the compositions and methods described herein can be a fusion protein containing a zinc finger DNA-binding protein and a protein that can cleave the target nucleic acid. For example, a protein that can cleave the target nucleic acid can be a wild-type or mutated FokI endonuclease or the catalytic domain of FokI. Detailed descriptions of TALENs and their uses for gene editing are found, e.g., in U.S. Pat. Nos. 8,440,431; 8,440,432; 8,450,471; 8,586,363; and 8,697,853; Scharenberg et al., Curr Gene Ther, 2013, 13(4):291-303; Gaj et al., Nat Methods, 2012, 9(8):805-7; Beurdeley et al., Nat Commun, 2013, 4:1762; and Joung and Sander, Nat Rev Mol Cell Biol, 2013, 14(1):49-55. Examples of a zinc finger DNA-binding protein fused to a protein that can cleave the target nucleic acid are described in the art and include, but are not limited to, those described in Urnov et al., Nature Reviews Genetics, 2010, 11:636-646; Gaj et al., Nat Methods, 2012, 9(8):805-7; U.S. Pat. Nos. 6,534,261; 6,607,882; 6,746,838; 6,794,136; 6,824,978; 6,866,997; 6,933,113; 6,979,539; 7,013,219; 7,030,215; 7,220,719; 7,241,573; 7,241,574; 7,585,849; 7,595,376; 6,903,185; 6,479,626; and U.S. Application Publication Nos. 2003/0232410 and 2009/0203140.

[0097] In some embodiments, the targetable nuclease does not have nuclease activity. For example, the targetable nuclease (e.g., a targetable nuclease without any nuclease activity) can regulate the expression of the target nucleic acid. In some embodiments, the targetable nuclease can be a fusion protein that includes a protein that can bind to the target nucleic acid, such as a Cas protein variant without any cleavage activity (e.g., a dCas9), a TAL effector DNA-binding protein, and a zinc finger DNA-binding protein as described above, and a protein that can modify the target nucleic acid, such as a transcription activator or repressor.

[0098] The targetable nuclease can also be fused with a localization peptide or protein. For example, the targetable nuclease can be fused with one or more nuclear localization signal (NLS) sequences, which can direct the targetable nuclease and the RNP complexes it forms to the nucleus to modify the target nucleic acid. Examples of NLS sequences are known in the art, e.g., as described in Lange et al., J Biol Chem. 282(8):5101-5, 2007, and also include, but are not limited to, AVKRPAATKKAGQAKKKKLD (SEQ ID NO: 6), MSRRRKANPTKLSENAKKLAKEVEN (SEQ ID NO: 7), PAAKRVKLD (SEQ ID NO:8), KLKIKRPVK (SEQ ID NO:9), and PKKKRKV (SEQ ID NO:10). Examples of other peptide or proteins that can be used to a targetable nuclease, such as cell-penetrating peptides and cell-targeting peptides are available in the art and described, e.g., Vives et al., Biochim Biophys Acta. 1786(2):126-38, 2008. In some embodiments, the targeted nuclease is a Cas9 nuclease.

[0099] In some embodiments, the targeted nuclease, the guide RNA, and the DNA template are introduced into the cell as a ribonucleoprotein complex (RNP)-DNA template complex. The RNP-DNA template complex may be formed, for example, by incubating the RNP with the DNA template for less than about one minute to about thirty minutes, at a temperature of about 20° C. to about 25° C. In some embodiments, the RNP-DNA template complex and the cell are mixed prior to introducing the RNP-DNA template complex into the cell.

[0100] In some embodiments, introducing the RNP-DNA template complex into the cell comprises electroporation. Methods, compositions, and devices for electroporating cells to introduce a RNP-DNA template complex can include those described in the examples herein. Additional or alternative methods, compositions, and devices for electroporating cells to introduce a RNP-DNA template complex can include those described in WO/2006/001614 or Kim, J. A. et al. Biosens. Bioelectron. 23, 1353-1360 (2008). Additional or alternative methods, compositions, and devices for electroporating cells to introduce a RNP-DNA template complex can include those described in U.S. Patent Appl. Pub. Nos. 2006/0094095; 2005/0064596; or 2006/0087522. Additional or alternative methods, compositions, and devices for electroporating cells to introduce a RNP-DNA template complex can include those described in Li, L. H. et al. Cancer Res. Treat. 1, 341-350 (2002); U.S. Pat. Nos. 6,773,669; 7,186,559; 7,771,984; 7,991,559; 6,485,961; 7,029,916; and U.S. Patent Appl. Pub. Nos: 2014/0017213; and 2012/0088842. Additional or alternative methods, compositions, and devices for electroporating cells to introduce a RNP-DNA template complex can include those described in Geng, T. et al., J. Control Release 144, 91-100 (2010); and Wang, J., et al. Lab. Chip 10, 2057-2061 (2010).

[0101] In some embodiments, the methods further include administering a cell comprising a modified gene (e.g., an autosomal dominant gene) to a human or other subject. In some embodiments, the subject is same subject from whom the cell having the endogenous autosomal dominant gene was obtained.

### D. Genome Edited Cells

[0102] Also provided herein are isolated cells (including, but not limited to, human T cells and hematopoietic stem cells) having an edited genome. The cells can be prepared according to the methods described above. For example, isolated human T cells having an edited genome comprising a modified CTLA4 gene are provided, wherein the CTLA4 gene includes an CTLA4 open reading frame (ORF) comprising an endogenous exon 1 and exogenous exons 2-4, wherein the exogenous exons are free of disease-causing mutations.

[0103] Cell populations according to the present disclosure (e.g., a population of T cells) can be a heterogeneous population of cells and/or a heterogeneous population of different cell types. The population of cells can be heterogeneous with respect to the percentage of cells that are genomically edited. A population of cells can have greater than 10%, greater than 20%, greater than 30%, greater than 40%, greater than 50%, greater than 60%, greater than 70%, greater than 80%, or greater than 90% of the population comprise an integrated nucleotide sequence. In a certain aspect, a populations of cells comprises an integrated nucleotide sequence, wherein the integrated nucleotide sequence comprises at least a portion of a gene, the integrated nucleotide sequence is integrated at an endogenous genomic target locus, and the integrated nucleotide sequence is orientated such that the at least a portion of the gene is capable of being expressed, wherein the population of cells is substantially free of viral-mediated delivery components, and wherein greater than 10%, greater than 20%, greater than 30%, greater than 40%, greater than 50%, greater than 60%, greater than 70%, greater than 80%, or greater than 90% of the cells in the population comprise the integrated nucleotide sequence.

[0104] In some embodiments, the cell is a primary cell that is selected from the group consisting of an immune cell (e.g., a primary T cell), a blood cell, a progenitor or stem cell thereof, a mesenchymal cell, and a combination thereof. In some instances, the immune cell is selected from the group consisting of a T cell, a B cell, a dendritic cell, a natural killer cell, a macrophage, a neutrophil, an eosinophil, a basophil, a mast cell, a precursor thereof, and a combination thereof. The progenitor or stem cell can be selected from the group consisting of a hematopoietic progenitor cell, a hematopoietic stem cell, and a combination thereof. In some cases, the blood cell is a blood stem cell. In some instances, the mesenchymal cell is selected from the group consisting of a mesenchymal stem cell, a mesenchymal progenitor cell, a mesenchymal precursor cell, a differentiated mesenchymal cell, and a combination thereof. The differentiated mesenchymal cell can be selected from the group consisting of a bone cell, a cartilage cell, a muscle cell, an adipose cell, a stromal cell, a fibroblast, a dermal cell, and a combination thereof. In some embodiments, the primary cell can comprise a population of primary cells. In some cases, the population of primary cells comprises a heterogeneous population of primary cells. In other cases, the population of primary cells comprises a homogeneous population of primary cells.

[0105] Methods for modifying a target nucleic acid in a cell described herein comprise introducing into the cell a composition described herein, wherein the HDRT is integrated into the target nucleic acid. In some cases, the cells are removed from a subject, modified using any of the methods described herein and administered to the subject. In other cases, a composition described herein can be delivered to the subject in vivo. See, for example, U.S. Pat. No. 9,737,604 and Zhang et al. “Lipid nanoparticle-mediated efficient delivery of CRISPR/Cas9 for tumor therapy,” NPG Asia Materials Volume 9, page e441 (2017). A DNA template or RNP complex described herein can be introduced into cells using available methods and techniques in the art. Non-limiting examples of suitable methods include electroporation, particle gun technology, and direct microinjection. In some embodiments, the step of introducing the composition described herein into the cell comprises electroporating the composition into the cell.

### E. Small Molecules

[0106] In some embodiments, the targeted nuclease, the guide RNA, and the DNA template are introduced into the cell in the presence of one or more small molecules selected from the group consisting of a DNA-dependent protein kinase (DNA-PK) inhibitor, a histone deacetylase (HDAC) inhibitor, and a cell division cycle 7-related protein kinase (CDC7) inhibitor.

[0107] In some embodiments, the DNA-PK inhibitor is (S)-(2-chloro-4-fluoro-5-(7-morpholinoquinazolin-4-yl)phenyl)(6-methoxypyridazin-3-yl)methanol (M3814) or 8-(dibenzo[b,d]thiophen-4-yl)-2-morpholino-4H-chromen-4-one (NU7441).

[0108] In some embodiments, the HDAC inhibitor is [R-(E,E)]-7-[4-(dimethylamino)phenyl]-N-hydroxy-4,6-dimethyl-7-oxo-2,4-heptadienamide (trichostatin A).

[0109] In some embodiments, the CDC7 inhibitor is (S)-8-chloro-2-(pyrrolidin-2-yl)benzofuro[3,2-d]pyrimidin-4(3H)-one hydrochloride (XL413).

### II. Methods for Treating Haploinsufficiency

[0110] Also provided herein are methods for treating a haploinsufficiency. The methods include administering a therapeutically effective amount of cells (e.g., human T cells) as described herein to a subject in need thereof.

[0111] In some embodiments, the haploinsufficiency causes a primary immunodeficiency. The primary immunodeficiency may, for example, affect cellular and humoral immunity (e.g., as in the case of RelA haploinsufficiency and IKAROS deficiency). The immunodeficiency may be predominantly an antibody deficiency (e.g., as in the case of nuclear factor KB subunit 1 (NFKB1) deficiency) or a disease of immune dysregulation (e.g., as in the case of CTLA-4 haploinsufficiency and NFATS haploinsufficiency). The immunodeficiency may involve defects in phagocyte number or function (e.g., as in the case of 3-actin deficiency and leukocyte adhesion deficiency type 1) or defects in intrinsic and innate immunity (e.g., as in the case of trypanosomiasis and isolated congenital asplenia). The immunodeficiency may be an autoinflammatory disorder (e.g., as in the case of ADA2 deficiency and CARD14 mediated psoriasis), a complement deficiency (e.g., as in the case of Factor H deficiency or thrombomodulin deficiency), or a condition involving bone marrow failure (e.g., as in the case of ataxia pancytopenia syndrome or Fanconi anemia or SRP72 deficiency). The immunodeficiency may be a combined deficiency with associate or syndromic features (e.g., as in the case of Jacobsen syndrome and CHARGE syndrome).

[0112] In some embodiments the haploinsufficiency is due to one or more disease-causing mutations in a gene such as 11 q23del, ACD, ACTB, ADAM17, AICDA, AIRE, APOL1, BACH2, BCL11B, C1R, CIS, C3, CARD11, CARD14, CASP10, CD46, CFB, CFH, CFHR1, CFHR2, CFHR3, CFHR4, CFHR5, CHD7, COPA, CXCR4, Del10p13-p14, ELANE, ERBB2IP, FADD, FERMT3, FNGR1, FOXN1, GATA2, GFI1, IFIH1, IKBKB, IKZF1, IL17F, IRF2BP2, IRF3, IRF4, IRF8, ITGB2, JAK1, KMT2A, KMT2D, MAD2L2, MEFV, NCSTN, NFATS, NFKB1, NFKB2, NFKBIA, NLRC4, NLRP1, NLRP3, NLRP3, NLRP12, NOD2, OAS1, PIK3CD, PIK3R1, PLCG2, POLR3A, POLR3C, POLR3F, PSEN, PSENEN, PSMB8, PSTPIP1, PTEN, RAC2, RAD51, RAD51C, RELA, RPSA, RTEL1, SAMD9, SAMD9L, SEC61A1, SEMA3E, SERPING1, SH3BP2, SLC35C1, SRP54, SRP72, STAT1, STAT3, STAT5b, STXBP2, TBK1, TBX1, TCF3, TERC, TERT, TGFBR1, TGFBR2, THBD, TIMCAM1, TINF2, TLR3, TNFAIP, TNFRSF13B, TNFRSF1A, TNFRSF6, TNFS12, TOP2B, TP53, and TRAF3, or a combination thereof. In some embodiments, the haploinsufficiency is CTLA4 haploinsufficiency.

### III. Methods for Enhancing CRISPR Efficiency

[0113] Also provided herein are methods for generating nucleotide deletions in a target gene in a cell. The methods include:
[0114] electroporating the cell in the presence of:
[0115] (i) a ribonucleoprotein (RNP) complex comprising a targeted nuclease and a guide RNA, wherein the guide RNA specifically hybridizes to a nucleotide sequence in the target gene, and
[0116] (ii) one or more small molecules selected from the group consisting of a DNA-dependent protein kinase (DNA-PK) inhibitor, a histone deacetylase (HDAC) inhibitor, and a cell division cycle 7-related protein kinase (CDC7) inhibitor,
[0117] wherein electroporating the cell is conducted in the absence of a homology directed repair template, thereby introducing the RNP into the cell; and
[0118] maintaining the cell under conditions for forming one or more nucleotide deletions in the target gene.

[0119] Also provided herein are methods for modifying a target gene in a cell, comprising:
[0120] electroporating the cell in the presence of:
[0121] (a) a ribonucleoprotein (RNP) complex comprising a guide RNA and a targeted nuclease, wherein the guide RNA specifically hybridizes to a nucleotide sequence in a genomic target region and the targeted nuclease creates an insertion site in the genomic target region;
[0122] (b) a single-stranded DNA template comprising an exogenous nucleic acid sequence, wherein the 5′ end and the 3′ end of the DNA template comprise nucleotide sequences that are homologous to genomic sequences flanking the genomic target region, and wherein the DNA template further comprises a nuclease binding sequence, wherein the nuclease binding sequence forms a double-stranded duplex with a complementary nucleotide sequence; and
[0123] (c) one or more molecules selected from the group consisting of a DNA-dependent protein kinase (DNA-PK) inhibitor, a histone deacetylase (HDAC) inhibitor, and a cell division cycle 7-related protein kinase (CDC7) inhibitor,
[0124] thereby modifying the target gene.

[0125] Examples of DNA-PK inhibitors include, but are not limited to pyrazolopyrimidines (as described, for example, in WO 2020/238900), quinazoline carboxamides and other substituted quinazolines (as described, for example, in WO 2013/163190), substituted dibenzothiophenes (as described for example, in WO 2006/109081). The amount of the DNA-PK inhibitor will depend, in part, on factors such as the particular inhibitor employed, the structure of the DNA template, and the conditions under which the template is introduced into the cell. In some embodiments, the cell, the DNA template, and other components are combined with the DNA-PK inhibitor at a concentration of about 0.01 μM to about 10 μM, or about 0.05 μM to about 5 μM, or about 0.1 μM to about 2.5 μM, or about 0.2 μM to about 2.5 μM, or about 0.2 μM to about 1.5 μM, or about 0.2 μM to about 1 μM, or about 0.5 μM to about 1.5 μM, or about 0.8 μM to about 1.2 μM.

[0126] In some embodiments, the DNA-PK inhibitor is a substituted quinazoline or a substituted dibenzothiophene which may be employed, for example, at a concentration of about 0.2 μM to about 2.5 μM, or about 0.2 μM to about 1.5 μM, or about 0.2 μM to about 1 μM. In some embodiments, the DNA-PK inhibitor is (S)-(2-chloro-4-fluoro-5-(7-morpholinoquinazolin-4-yl)phenyl)(6-methoxypyridazin-3-yl)methanol (M3814) or 8-(dibenzo[b,d]thiophen-4-yl)-2-morpholino-4H-chromen-4-one (NU7441).

[0127] Examples of HDAC inhibitors include, but are not limited to hydroxamic acids (e.g., trichostatin A, vorinostat, and the like), benzamides (e.g., entinostat, tacedinaline, mocetinostat, and the like), cyclic peptides and related analogs (e.g., trapoxin, apicidin, largazole, and the like), and aliphatic acids/esters (e.g., phenylbutyrate, valproic acid, and the like). The amount of the HDAC inhibitor will depend, in part, on various factors as described above. In some embodiments, the cell, the DNA template, and other components are combined with the HDAC inhibitor at a concentration of about 0.005 μM to 0.09 μM, or about 0.01 μM to 0.08 μM, or about 0.015 μM to 0.075 μM, or about 0.02 μM to 0.075 μM, or about 0.03 μM to 0.07 μM, or about 0.04 μM to 0.06 μM.

[0128] In some embodiments, the HDAC inhibitor is a hydroxamic acid which may be employed, for example, at a concentration of about 0.01 μM to 0.08 μM, or about 0.015 μM to 0.075 μM, or about 0.02 μM to 0.075 μM. In some embodiments, the HDAC inhibitor is trichostatin A.

[0129] Examples of CDC7 inhibitors include, but are not limited to pyrimidinones (as described, for example, in WO 2018/087527 and WO 2011/102399), indazoles (as described, for example in WO 2007/124288) and pyrrolopyridines (as described, for example, in WO 2005/063746). The amount of the CDC7 inhibitor will depend, in part, on various factors as described above with respect to DNA-PK inhibitors and HDAC inhibitors. In some embodiments, the cell, the DNA template, and other components are combined with the CDC7 inhibitor at a concentration of about 0.1 μM to about 75 μM, or about 0.5 μM to about 50 μM, or about 1 μM to about 25 μM, or about 2 μM to about 25 μM, or about 2 μM to about 15 μM, or about 2 μM to about 10 μM, or about 5 μM to about 15 μM, or about 8 μM to about 12 μM.

[0130] In some embodiments, the CDC7 inhibitor is a pyrimidinone (e.g., a benzofuropyrimidinone) which may be employed, for example, at a concentration of about 2 μM to about 25 μM, or about 2 μM to about 15 μM, or about 2 μM to about 12 μM. In some embodiments, the CDC7 inhibitor is (S)-8-chloro-2-(pyrrolidin-2-yl)benzofuro[3,2-d]pyrimidin-4(3H)-one hydrochloride (XL413).

[0131] Also provided herein are methods for modifying a target gene in a cell, comprising:
[0132] combining the cell with:
[0133] (a) a targeted nuclease that creates an insertion site in a genomic target region in the cell,
[0134] (b) a guide RNA that specifically hybridizes to the genomic target region,
[0135] (c) a DNA template comprising an exogenous nucleic acid sequence, and
[0136] (d) one or more small molecules selected from the group consisting of
   [0137] (S)-(2-chloro-4-fluoro-5-(7-morpholinoquinazolin-4-yl)phenyl)(6-methoxypyridazin-3-yl)methanol (M3814) at a concentration of 0.2 μM to 1 μM,
   [0138] 8-(dibenzo[b,d]thiophen-4-yl)-2-morpholino-4H-chromen-4-one (NU7441) at a concentration of 0.2 μM to 1 μM,
   [0139] [R-(E,E)]-7-[4-(dimethylamino)phenyl]-N-hydroxy-4,6-dimethyl-7-oxo-2,4-heptadienamide (trichostatin A) at a concentration of 0.015 μM to 0.075 μM, and
   [0140] (S)-8-chloro-2-(pyrrolidin-2-yl)benzofuro[3,2-d]pyrimidin-4(3H)-one hydrochloride (XL413) at a concentration of 2 μM to 15 μM;
[0141] electroporating the cell, the targeted nuclease, the guide RNA, the DNA template, and the small molecules; and
[0142] maintaining the cell under conditions for insertion of the exogenous nucleic acid sequence into the insertion site, thereby modifying the target gene.

[0143] In some embodiments, the cell is combined with the M3814 and trichostatin A. In some embodiments, the cell is combined with the M3814, the trichostatin A, and the XL413.

### IV. Examples

### Example 1. Materials and Methods

[0144] Cell Culture. Primary adult blood cells were obtained from anonymous healthy human donors as a leukapheresis pack purchased from StemCell Technologies, Inc. or Allcells Inc, or as a Trima residual from Vitalant. If needed, peripheral blood mononuclear cells were isolated by Ficoll-Paque (GE Healthcare) centrifugation. Primary human cell types were then further isolated by positive and/or negative selection using EasySep magnetic cell isolation kits purchased from StemCell for CD3+ T cells (Cat #17951), CD4+ T cells (Cat #17952), CD8+ T cells (Cat #17953), B cells (Cat #17954), NK cells (Cat #17955), or CD4+CD127lowCD25+ regulatory T cells (Cat #18063) per manufacturer instructions. Primary human γδ T cells were isolated using a custom γδ T cell negative isolation kit without CD16 and CD25 depletion obtained from StemCell. Primary adult peripheral blood G-CSF-mobilized CD34+ hematopoietic stem cells were purchased from StemExpress, LLC.

[0145] With the exception of GMP-compatible scale-up experiments (described separately below), isolated CD3+, CD4+, CD8+, and γδ T cells were activated at 1×10⁶ cells mL⁻¹ for 2 days in complete XVivo15 medium (Lonza) (5% fetal bovine serum, 50 μM 2-mercaptoethanol, 10 mM N-acetyl L-cysteine) supplemented with anti-human CD3/CD28 magnetic Dynabeads (CTS, ThermoFisher) in a 1:1 ratio with cells, 500 U mL⁻¹ of IL-2 (UCSF Pharmacy), and 5 ng mL⁻¹ of IL-7 and IL-15 (R&D Systems). Regulatory T cells were activated at 1×10⁶ cells mL⁻¹ for 2 days in complete XVivo15 supplemented with magnetic Treg Xpander CTS Dynabeads (ThermoFisher) at a 1:1 bead to cell ratio and 500 U mL⁻¹ of IL-2 (UCSF Pharmacy). Isolated B cells were activated at 1×10⁶ cells mL⁻¹ for 2 days in IMIDM medium (ThermoFisher) with 10% fetal bovine serum, 50 μM 2-mercaptoethanol, 100 ng mL-1 MEGACD40L (Enzo), 200 ng mL⁻¹ anti-human RP105 (Biolegend), 500 U mL⁻¹ IL-2 (UCSF Pharmacy), 50 ng mL⁻¹ IL-10 (ThermoFisher), and 10 ng mL⁻¹ IL-15 (R&D Systems). Isolated NK cells were activated at 1×10⁶ cells mL⁻¹ for 5 days in XVivo15 medium (Lonza) with 5% fetal bovine serum, 50 μM 2-mercaptoethanol, 10 mM N-acetyl L-cysteine, 1000 U mL⁻¹ IL-2, and MACSiBead Particles pre-coated with anti-human CD335 (NKp46) and CD2 antibodies based on manufacturer guidelines (Miltenyi Biotec). Primary adult CD34+ HSCs were cultured at 0.5×10⁶ cells per mL in SFEMII medium supplemented with CC 110 cytokine cocktail (StemCell).

[0146] For GMP-compatible scale-up experiments, CD3+ T cells were activated with anti-human CD3/CD28 magnetic Dynabeads (CTS, ThermoFisher) in a 1:1 ratio with 100 U mL⁻¹ of IL-7 and 10 U mL⁻¹ IL-15 (R&D Systems) in tissue culture flasks. Post-electroporation, cells were expanded in G-Rex 100M gas-permeable culture vessels (Wilson Wolf) supplemented with 100 U mL⁻¹ of IL-7 and 10 U mL⁻¹ IL-15 every 2-3 days for a total 7 or 10 day expansion as indicated.

[0147] RNP Formulation. For most experiments (excluding GMP-compatible scale-up described separately below), ribonucleoproteins (RNP) were produced by complexing a two-component gRNA to Cas9 with addition of either a Poly-glutamic acid (PGA) or ssDNAenh electroporation enhancer, as previously described (Nguyen, D. N. et al. Nature biotechnology 38, 44-49, (2020)). Synthetic CRISPR RNA (crRNA, with guide sequences listed in Table 1) and trans-activating crRNA (tracrRNA) were chemically synthesized (Edit-R, Dharmacon Horizon), resuspended in 10 mM Tris-HCl (pH 7.4) with 150 mM KCl or TDT duplex buffer at a concentration of 160 μM, and stored in aliquots at −80′° C. 15-50 kDa PGA was purchased from Sigma and resuspended to 100 mg ml-1 in water, sterile filtered, and stored at −80° C. prior to use. The ssDNAenh electroporation enhancer was purchased from IDT (TTAGCTCTGTTTACGTCCCAGCGGGCATGAGAGTA ACAAGAGGGTGTGGTAATATTACGGTACCGAGCACTATCGATACAATATGTGTCATA CGGACACG; SEQ ID NO: 11), resuspended to 100 μM in water, and stored at −80′° C.

TABLE 1

| | | | SEQ |
|---|---|---|---|
| | | crRNA 20 bp sequence | ID |
| crRNA ID | Target | (5′→3′) | NO: |
| G147 | CLTA | GAACGGATCCAGCTCAGCCA | 12 |
| G377 | IL2RA | TGAGCAGTCCCCACATCAGC | 13 |
| G520 | CTLA-4 | gatatgacaaacagaagacc | 4 |
| G472 | CD5 | CAGTCGCTTCCTGCCTCGGA | 14 |
| G526 | TRAC (exon) | TCAGGGTTCTGGATATCTGT | 15 |
| G527 | TRAC (intron) | CTGGATATCTGTGGGACAAG | 16 |
| CD7 g1 | CD7 | TCAGCTGCACTCGCCCGGCT | 17 |
| CD7 g2 | CD7 | CCAGAAGCAGGGGCAGCAGC | 18 |
| LRBA g1 | LRBA | CCATTGCTAGCTCACGATAA | 19 |
| LRBA g2 | LRBA | CCTTTATCGTGAGCTAGCAA | 20 |
| CD40LG g1 | CD40LG | AAAGTTGAAATGGTATCTTC | 21 |
| CD40LG g2 | CD40LG | ATGCTGTGTTAAAGTTGAAA | 22 |
| MAGT1 g1 | MAGT1 | ACGTAATGTGAGGGGTCTCC | 23 |
| MAGT1 g2 | MAGT1 | GGCCCCTTGCCTTTCCTCAT | 24 |
| WASP g1 | WASP | CTTTCTGCCCTTGTCTTCTC | 25 |
| WASP g2 | WASP | ATGAGTGGGGGCCCAATGGG | 26 |
| RHOH g1 | RHOH | GGACTTCAGAGTAGGACAGC | 27 |
| RHOH g2 | RHOH | TCAGAGTAGGACAGCAGGCT | 28 |
| BCL10 g1 | BCL10 | AGGTCCTCCTCGGTGAGGGA | 29 |
| BCL10 g2 | BCL10 | CTCGGTGAGGGACGGTGCGG | 30 |
| ITGB2 g1 | ITGB2 | AGCATGTCCTGTGGAGGGAA | 31 |
| ITGB2 g2 | ITGB2 | AGGCCCAGCATGTCCTGTGG | 32 |
| IL 10RA g1 | IL10RA | CTGGGCGCGCCGCATCGTCC | 33 |
| IL 10RA g2 | IL10RA | GCCAGCAGCACTACGAGGCA | 34 |
| SAP g1 | SAP | CCTTGCACAGTTCTCCTCCT | 35 |
| SAP g2 | SAP | CAGCCACTGCGTCCATGGCC | 36 |
| PI3KCD g1 | PI3KCD | TTTTTAGGACAACTGTCATC | 37 |
| PI3KCD g2 | PI3KCD | TAACAACGCAGGATGCCCCC | 38 |
| CD4 g1 | CD4 | TCGGCAAGGCCACAATGAAC | 39 |
| CD4 g2 | CD4 | GCTCAGGCCCCTGCCTCCCT | 40 |
| CD5 g1 | CD5 | AGCAGGTACAAGGTGGCCAG | 41 |
| CD5 g2 | CD5 | CATGGGGTCTCTGCAACCGC | 42 |
| STAT3 g1 | STAT3 | TTGGGACCCCTGATTTTAGC | 43 |
| STAT3 g2 | STAT3 | GCTGCTGTAGCTGATTCCAT | 44 |
| ZAP70 g1 | ZAP70 | TGCTGCCGTAGAAGAAGGGC | 45 |
| ZAP70 g2 | ZAP70 | GAGATGCTGCCGTAGAAGAA | 46 |
| PI3KR1 g1 | PI3KR1 | AACCAGGCTCAACTGTTGCA | 47 |
| PI3KR1 g2 | PI3KR1 | ATTTGCAAACATGAGTGCTG | 48 |
| STIM1 g1 | STIM1 | ACGCATACATCCATGACTCT | 49 |
| STIM1 g2 | STIM1 | CAGTCAACATGCGTCTGATG | 50 |
| CD45 g1 | CD45 | CACAAATACATGGTCATATC | 51 |
| CD45 g2 | CD45 | GTATTTGTGGCTTAAACTCT | 52 |
| CD3D g1 | CD3D | GAACATAGCACGTTTCTCTC | 53 |
| CD3D g2 | CD3D | GGATGAGTTCCGCTGGGAGA | 54 |
| CD2 g1 | CD2 | ACATGGAAAGCTCATCTTAG | 55 |
| CD2 g2 | CD2 | TACATGGAAAGCTCATCTTA | 56 |
| CD3G g1 | CD3G | CCATGTCAGTCTCTGTCCTC | 57 |
| CD3G g2 | CD3G | CCGGAGGACAGAGACTGACA | 58 |
| CD3Z g1 | CD3Z | AGGGAAAGGACAAGATGAAG | 59 |
| CD3Z g2 | CD3Z | GCCTCCCAGCCTCTTTCTGA | 60 |
| CD3E g1 | CD3E | AGATGCAGTCGGGCACTCAC | 61 |
| CD3E g2 | CD3E | CCATGAAACAAAGATGCAGT | 62 |

[0148] To make gRNA, aliquots of crRNA and tracrRNA were thawed, mixed 1:1 v/v, and annealed by incubation at 37° C. for 30 min to form an 80 μM gRNA solution. PGA or ssDNAenh were mixed into gRNA solutions at a 0.8:1 volume ratio prior to adding 40 μM Cas9-NLS (Berkeley QB3 MacroLab) at a 1:1 v/v to attain a molar ratio of sgRNA:Cas9 of 2:1. Final RNP mixtures were incubated at 37° C. for 15-30 minutes after a thorough mix. Based on a Cas9 protein basis, 50 pmol of RNP was used for each electroporation.

[0149] For GMP-compatible scale-up experiments, synthetic single guide RNA (sgRNA) was purchased from Synthego, resuspended to 160 μM, aliquoted and stored at −80° C. SpyFi Cas9 nuclease was purchased from Aldevron LLC, aliquoted, and stored at −20° C. For RNP formulation, aliquots of ssDNAenh and sgRNA solutions were thawed and mixed at a 0.8:1 volume ratio prior to adding SpyFi Cas9 at a 2:1 molar ratio of sgRNA:Cas9. Final RNP mixtures were incubated at 37° C. for 15-30 minutes prior to electroporation.

[0150] HDRT Template Preparation. Short ssDNA HDRTs (<200 bp) were directly synthesized (Ultramer oligonucleotides, IDT), resuspended to 100 uM in dH20, and stored at −20° C. prior to use. Long dsDNA HDRTs encoding various gene insertions and 300-600 bp homology arms were synthesized as gBlocks (IDT) and cloned into a pUC19 plasmid in-house or purchased directly from Genscript Biotech. These plasmids then served as a template for generating a PCR amplicon. CTS sites were incorporated through additional 5′ sequence added to the base PCR primers. Amplicons were generated with KAPA HiFi polymerase (Kapa Biosystems), purified by SPRI bead cleanup, and resuspended in water to 0.5-2 μg μl−1 measured by light absorbance on a NanoDrop spectrophotometer (Thermo Fisher), as previously described (Nguyen et al. supra; Roth, T. L. et al. Nature 559, 405-409, (2018)).

[0151] For most experiments requiring long ssDNA (excluding GMP-compatible scale-up described separately below), a ssDNA isolation protocol adapted from Wakimoto et al. using biotinylated primers and streptavidin-coated magnetic beads was used (Current protocols in molecular biology 107, 2 15 11-19, (2014)). Amplicons were generated as described above using primers that include a 5′ biotin modification (IDT) on either the forward or reverse PCR primer. ˜20 uL Streptavidin C1 Dynabeads (ThermoFisher, Cat #65001) per 1 picomole of amplicon were rinsed 3 times with 1× Binding & Wash (B&W) buffer (prepared at 2× concentration and stored at RT using 10 mL 1M TRIS-HCl pH 7.5, 2 mL 0.5M EDTA, 116.88 g NaCl, 1 L dH20) using magnetic separation. The washed beads and the PCR amplicon were then resuspended in B&W buffer for 30 minutes at room temperature to capture the biotinylated DNA. The mixtures were washed twice with B&W buffer after which the supernatant was removed and replaced with 0.125M NaOH Melt Solution (prepared fresh) to denature the dsDNA. The solution is placed back on the magnet for 5 minutes and the supernatant containing the non-biotinylated strand is removed gently with non-stick pipettes and mixed immediately with Neutralization Buffer (100 uL 3M Sodium Acetate pH 5.2 and 4.9 mL 1×TE Buffer, prepared fresh). Resulting ssDNA was purified and concentrated using a SPRI bead cleanup, as described previously, and quantified on a Nanodrop spectrophotometer (Thermo Fisher).

[0152] Large-Scale ssDNA Production. For GMP-compatible scale-up experiments, research grade long single-stranded DNA was manufactured at large scale by Genscript Biotech via a proprietary isothermal enzymatic reaction process (PCT/CN2019/128948). To be brief, sequence verified template on plasmid vector is first be converted into uridine modified linear dsDNA fragments via PCR amplification. The linear dsDNA is then treated with USER® Enzyme and T4 ligase (Cat. #M5505S and M0202T, New England BioLabs) to form a self-ligated dsDNA circle with nicking sites. This nick containing dsDNA circle is used as an amplification template for rolling circle amplification, which is carried out by phi29 DNA polymerase (Cat. #M0269L, New England BioLabs) in a high fidelity and linear amplification manner. The product of rolling circle amplification is ssDNA concatemers with repeats of target fragment and a palindromic adapter sequence. The annealing process is followed to let the palindromic adapter sequence form a hairpin structure, and then BspQI restriction enzyme (Cat. #R0712L, New England BioLabs) is added in the reaction system to recognize the stem part of the hairpin and digest the concatemer intermediates into target ssDNA monomers and hairpin adapters. The crude product is further purified by EndoFree® Plasmid Maxi Kit (Qiagen, Cat. #12362), to harvest the target ssDNA and remove hairpin adapters, enzymes, reaction buffer, and endotoxin residues.

[0153] For production of the 2,923nt BCMA-CAR encoding ssDNA material, amplification primers were synthesized to add specially designed adapter sequences at the 5′ and 3′ ends of the target sequence via PCR method. The uridine modified forward and reverse primer sequences manufactured by Genscript were: 5′-AACTATACUACGTCAATCGGCTCTTCACACTACTACAGTGCCAATAG-3′ (SEQ ID NO: 74) and 5′-TATAGTUACGTCAATCGGC TCTTCACACCGTCTGACTAACATAACCTG-3′ (SEQ ID NO: 75), respectively. The cycle number of the PCR reaction was set as 20, and 300 g of linear dsDNA fragment was produced and purified by QIAquick PCR Purification Kit (Qiagen, Cat. #28706). All of the purified 300 μg of linear dsDNA was treated with USER enzyme and T4 ligase to prepare the rolling circle amplification template, and then, it was used as the template for a 100 mL RCA reaction. All of the isothermal enzymatic reactions and annealing process were done on Eppendorf ThermoMixer® C. The final purified ssDNA sample was eluted with nuclease-free water (Sigma Aldrich, Cat. #W4502) from the silica column of an EndoFree® Plasmid Maxi Kit, and then passed single-use 0.22 μm sterile filter (Millipore, Cat. #SLGV033RS). Before lyophilization and final packaging, the ssDNA material was quantified by Nanodrop One^{C} (Thermo Fisher) by UV 260 nm absorbance in single-stranded DNA mode. The sequence integrity was confirmed by Sanger sequencing, and the homogeneity was measured by 2% agarose gel electrophoresis as a single band. Quality control for biosafety of the ssDNA material was also evaluated: endotoxin residue was determined as <10 EU/mg by an endotoxin test kit (Bioendo, Cat. #KC5028), protein residue level was below the minimum detection threshold of Micro BCA Protein Assay Kit (Thermo Fisher, Cat. #23235), and no bacterial colonies formed in bioburden detection.

[0154] Electroporation and use of small molecule inhibitors. Except for GMP-compatible scale-up experiments, primary cells were isolated on day 2 of culture (HSCs, CD3+, CD4+, CD8+, γδ, and regulatory T cells) or day 5 (NK cells) and electroporated using the Lonza 4D 96-well electroporation system as previously described (Nguyen, supra). CD3+, CD4+, CD8+, γδ, and regulatory T cells were debeaded using an EasySep magnet (StemCell). Immediately prior to electroporation, cells were centrifuged at 90 g for 10 minutes and then resuspended at 0.4×10⁶ HSCs, 0.5×10⁶-1.0×10⁶ T cells, 0.5×10⁶ NK cells, or 0.5×10⁶ B cells per 20 uL Lonza P3 buffer. HDRT and RNP formulations were mixed and incubated for at least 5 minutes, then combined with cells and transferred to the Lonza 96-well electroporation shuttle. B cells, NK cells, and all T cell subtypes were electroporated using pulse code EH-115 while HSCs were electroporated with pulse code ER-100. Following electroporation, cells were rescued with prewarmed growth media and incubated for at least 15 minutes. Cells were then transferred to fresh plates or flasks and diluted to 0.5-1.0×10⁶ cells mL⁻¹ in each respective growth medium as described above. Fresh cytokines and media were added every 2-3 days.

[0155] Trichostatin A (TSA) (Cayman Chemical), Nedisertib (M3814) (MedKoo Biosciences), XL413 hydrochloride (XL413) (Fisher Scientific), NU7441 (Fisher Scientific), and Alt-R HDR enhancer (IDT) were prepared and stored as aliquots per manufacturer guidelines. For experiments using small molecule inhibitors, cells were incubated with the indicated concentrations upon addition of fresh growth media following the 15 minute rescue step, and removed by media exchange after 24 hours. Longer incubation times of 48 and 72 hours did not improve knock-in efficiency further and were associated with increased toxicity (data not shown).

[0156] For GMP-compatible scale-up experiments, activated cells were separated from beads on day 2 and centrifuged for 10 minutes at 90 g. After removing the supernatant, cells were resuspended in Maxcyte Electroporation Buffer at 200×10⁶ cells mL⁻¹. HDRTs and RNPs were mixed and incubated for at least 5 minutes before being combining with cells. The mixture was then transferred to Maxcyte OC-1000 electroporation cuvettes. Cuvettes were filled up to ˜60% of the total volume (˜600 uL) and electroporated with pulse code Expanded T cell 4-2. Immediately following electroporations, ˜400 uL prewarmed XVivo15 media was added to the cuvette and cells were incubated for 15 minutes, then transferred to G-Rex culture vessels as described above.

[0157] Flow Cytometry. All flow cytometry was performed on an Attune NxT flow cytometer with a 96-well autosampler (Thermo Fisher Scientific). Unless otherwise indicated, cells were collected 3-5 days post-electroporation, resuspended in FACS buffer (1%-2% BSA in PBS) and stained with Ghost Dye red 780 (Tonbo) and the indicated cell-surface and intracellular markers (see Table 2 for antibodies). For intracellular staining, cells were stained for surface markers and then prepared for intracellular staining using True-Nuclear Transcription Factor staining kits (Biolegend). For experiments demonstrating stimulation response, cells were re-activated 24 hours prior to analysis using ImmunoCult Human CD3/CD28/CD2 T Cell Activation reagent (StemCell). Analysis was done using FlowJo v10 software. All gating strategies included exclusion of subcellular debris, singlet gating, and live:dead stain. Final graphs were produced with Prism (GraphPad), and figures were compiled with Illustrator (Adobe).

TABLE 2

| Target | Fluor | Vendor | Clone |
|---|---|---|---|
| Biotinylated Human BCMA/TNFRSF17 | — | Acro | — |
| Protein, His, Avitag | | Biosystems | |
| Biotinylated Human B7-1/CD80 Protein, | — | Acro | — |
| Fc, Avitag | | Biosystems | |
| Human TruStain FcX ™ (Fc Receptor Blocking | — | Biolegend | — |
| Solution) | | | |
| FOXP3 | Alexa 647 | Biolegend | 206D |
| Fixable Viability Dye eFluor ™ 780 | APC- | Invitrogen | — |
| | eFluor ™ | | |
| | 780 | | |
| GhostDye Red 780 | — | Tonbo | — |
| HA-Tag | Alexa 647 | Cell Signalling | 6E2 |
| Helios | PE | Biolegend | 22F6 |
| Hoechst 33342 | — | Invitrogen | — |
| LIVE/DEAD ® Fixable Aqua Dead Cell Stain | — | ThermoFisher | — |
| | | Scientific | |
| Myc-Tag | Alexa 647 | Cell Signalling | 9B11 |
| Streptavidin | PE | BD | — |
| Streptavidin | APC | Biolegend | — |
| CD19 | PacBlue | Biolegend | HIB19 |
| CD197 (CCR7) | PE | Miltenyi | REA108 |
| CTLA4 | BV-421 | BD | BNI3 |
| CD25 | BV-421 | Biolegend | BC96 |
| CD271 (NGFR) | FITC | Biolegend | ME20.4 |
| CD3 | APC | Biolegend | OKT3 |
| CD3 | PE-Cy7 | Biolegend | OKT3 |
| CD34 | BV-421 | Biolegend | 561 |
| CD4 | PE-Cy7 | Biolegend | OKT4 |
| CD4 | PE | BD | RPA-T4 |
| CD4 | FITC | Biolegend | SK3 |
| CD45RA | APC | Biolegend | HI100 |
| CD45RA | BV-650 | BD | HI100 |
| CD45RO | FITC | Tonbo | UCHL1 |
| CD5 | PacBlue | Beckman | BL1a |
| | | Coulter | |
| CD56 | BV-421 | Biolegend | 5.1H11 |
| CD62L | BV-421 | BD | DREG- |
| | | | 56 |
| CD8 | BV-421 | Biolegend | RPA-T8 |
| CD95 (Fas) | BV-711 | BioLegend | DX2 |
| TCR gamma/delta | FITC | Invitrogen | 5A6.E9 |
| TCR α/β | BV-421 | Biolegend | IP26 |

### Example 2. Development of ssCTS Templates for High-Efficiency and Low-Toxicity HDR in Primary Human T Cells

[0158] We previously developed a method to enhance delivery of dsDNA HDRTs through incorporation of Cas9 target sites (CTS) which include a gRNA target sequence and an NGG Protospacer-Adjacent-Motif (PAM) on each end of the template (Nguyen et al., supra). In comparison to dsDNA, ssDNA is associated with lower toxicity, which we reasoned could further improve knock-in efficiency and cell yield with large DNA templates if combined with CTS technology (Roth, et al., supra). We screened a variety of hybrid structures composed predominantly of ssDNA with small stretches of dsDNA incorporating the CTS sites through hairpin loops, annealed complementary oligonucleotides, or more complex secondary structures (FIG. 1A-C). We rapidly screened to compare HDRT designs using short 113-195 nt HDRTs that generate an N-terminal CD5-HA fusion protein easily detectable by flow cytometry (FIG. 2A-B). We found that the majority of these ssCTS designs increased knock-in efficiency (FIG. 1C). Improved efficiency with the ssCTS templates was apparent only at the lower 2 concentrations (160 nM and 800 nM), above which the knock-in efficiency appeared to hit a maximum of ˜30% that was achievable with unmodified ssDNA HDRTs (FIG. 1C, grey). These results suggested that ssCTS designs would be beneficial in situations where the HDRT concentration is limited, such as with large HDRTs that typically reach toxicity in the 10-320 nM range depending on their length and format.

[0159] For evaluation of large HDRTs, we chose an ssCTS design that incorporates CTS sites on both the 5′ and 3′ end via annealed complementary oligonucleotides, which are easy to design for research and clinical applications. In our panel of tested ssCTS constructs, this design demonstrated maximal enhancement of knock-in efficiency (FIG. 1B-C, “j”), low toxicity FIG. 2C), and provided the simplest process for generating CTS ends compared to hairpin loops or more complicated structures. Long ssDNA and dsDNA HDRTs ranging from 1500 nt to 2923 nt were generated with and without CTS sites (FIG. 1D-F). These templates target a knock-in detectable by flow cytometry (tNGFR, IL2RA-GFP fusion, or BCMA-CAR) to the IL2RA or TRAC locus. We evaluated post-electroporation knock-in efficiency, toxicity (based on live cell counts), and absolute yield of successful knock-in counts using primary T cells isolated from healthy human blood donors. Inclusion of CTS sites enhanced the knock-in efficiency of both dsDNA and ssDNA constructs across concentrations until toxic doses were reached, after which knock-in efficiency progressively decreased. ssCTS constructs demonstrated uniformly higher knock-in efficiencies and lower toxicity in comparison with dsCTS templates, generating up to 7-fold more knock-in cells at optimal non-toxic concentrations. The use of ssCTS templates allowed us to achieve up to 78.5% knock-in with a ˜1.5 kb tNGFR construct, or 38% for a ˜2.3 kb IL2RA-GFP construct targeting the IL2RA locus; and up to 39% knock-in with a ˜2.9 kb BCMA-specific CAR construct targeting the TRAC locus at HDRT concentrations compatible with high yields of live knock-in cells.

### Example 3. Exploration and Optimization of ssCTS Design Parameters for Large HDRTs

[0160] To learn rules regarding the precise sequences required for ssCTS-enhanced HDR, we evaluated variations of two constructs targeting either an IL2RA-GFP fusion to the IL2RA gene (˜2.3 kb, FIG. 1E) or a large version of the CD5-HA knock-in including >1 kb homology arms (˜2.7 kb, FIG. 3A). We first evaluated the specificity of the CTS sequences by replacing them with a mismatched CTS site specific for the alternative RNP, an equivalent length of dsDNA within the homology arm (“end protection”), or a CTS site with scrambled gRNA sequence (FIG. 4A, FIG. 3B). For both constructs, only the matching CTS recognized by the cognate RNP increased knock-in efficiency, suggesting specific recognition of the gRNA sequence.

[0161] We next examined closely which components of the CTS required dsDNA by annealing oligos of varied lengths and coverage (FIG. 4B, FIG. 3C). Coverage of the gRNA sequence, PAM, and a stretch of nucleotides within the homology arm downstream of the CTS site were each required for enhancement of knock-in efficiency while coverage of nucleotides upstream of the gRNA sequence in the 5′ buffer region was not. In agreement, inclusion of additional buffer sequence upstream of the CTS was not required at all and may in fact reduce the knock-in efficiency (FIG. 4C, FIG. 3D). Surprisingly, we saw that inclusion of a CTS on the 3′ end of both large ssCTS constructs provided no independent or additive benefit in combination with a 5′ CTS. Similar findings were seen within our short HDRT screen (FIG. 1B-C, “c” versus “d”). These intriguing results suggest only the 5′ CTS is functional in these designs which could reflect requirements for RNP binding and orientation, intracellular trafficking, or interference with repair machinery during 3′ annealing of long ssDNA.

[0162] We further examined the requirements for gRNA recognition by generating CTS sites with a variable number of scrambled bases at the 5′ end of the 20 bp gRNA recognition sequence (FIG. 4D, FIG. 3E). We found that for WT Cas9, the enhancement in knock-in efficiency was maximal with inclusion of 4-8 mismatched nucleotides. This level of mismatch likely allows the Cas9 RNP to bind without cleaving the CTS, as has been shown for truncated gRNAs. The pattern was similar with the high fidelity “SpyFi” Cas9 variant produced by Aldevron/IDT, which has been developed to reduce off-target cuts in clinical gene editing applications. Finally, we evaluated the length of the complementary oligonucleotide coverage within the downstream homology arm, demonstrating optimal knock-in when >20-40 bp of the homology arm has complementary sequence in the corresponding oligo (FIG. 4E, FIG. 3F). Taken together, these data establish design rules for end oligos to introduce CTS into large ssDNA templates and boost HDR outcomes, demonstrating that optimal designs need only incorporate a single CTS site on the 5′ end with a short stretch of dsDNA covering the gRNA recognition site, the PAM sequence, and ˜20 bp of the downstream homology arm (FIG. 4B, FIG. 3C). RNPs were formulated with Cas9-NLS proteins and either PGA or ssDNAenh anionic polymers prior to incubation with CTS templates. Full sequences for each component can be found in the table directly below (gRNA sequences) and at the bottom of the example (HDRT and CTS sequences and plasmid sequences).

TABLE A
Misc

| | | | SEQ |
|---|---|---|---|
| gRNA ID | Target | gRNA Target Sequence | ID NO: |
| G147 | CLTA | GAACGGATCCAGCTCAGCCA | 12 |
| G377 | IL2RA | TGAGCAGTCCCCACATCAGC | 13 |
| G520 | CTLA-4 | gatatgacaaacagaagacc | 4 |
| G472 | CD5 | CAGTCGCTTCCTGCCTCGGA | 14 |
| G526 | TRAC | TCAGGGTTCTGGATATCTGT | 15 |
| G527 | TRAC | CTGGATATCTGTGGGACAAG | 16 |

Arrayed Knockin Panel

| | | | SEQ |
|---|---|---|---|
| gRNA ID | Target | gRNA Target Sequence | ID NO: |
| G358: CTLA4-N 1 | CTLA4 | ACACCGCTCCCATAAAGCCA | 76 |
| G360: LAG3-N 1 | LAG3 | GACCATAGGAGAGATGTGGG | 77 |
| G368: CD28-N 1 | CD28 | TCGTCAGGACAAAGATGCTC | 78 |
| G403: CCR2 N 1 | CCR2 | GAGATGTGGACAGCATGTTG | 79 |
| G385: IL7R N 1 | IL7R | tctctcAGAATGACAATTCT | 80 |
| G421: STAT1 N 1 | STAT1 | TTCCCTATAGGATGTCTCAG | 81 |
| G534: JUNB-N2 | JUNB | CGCCCGGATGTGCACTAAAA | 82 |
| G535: IRF4-N1 | IRF4 | CACGCGGGGCATGAACCTGG | 83 |
| G536: FOXO1-N1 | FOXO1 | CACCTGAGGCGCCTCGGCCA | 84 |
| G537: FOXP1-N1 | FOXP1 | GAGTCATGATGCAAGAATCT | 85 |
| G375: IL2RB-N 2 | IL2RB | CAGACGCCAGGACAGAGCAG | 86 |
| G377: IL2RA-N 2 | IL2RA | TGAGCAGTCCCCACATCAGC | 13 |
| G538: ICOS N2 | ICOS | TTTCTGGCAAACATGAAGTC | 87 |
| G364: IL2RG-N 1 | IL2RG | TGGTAATGATGGCTTCAACA | 88 |
| G388: B2M N 2 | B2M | GGCCACGGAGCGAGACATCT | 89 |
| G390: ITGB7 N 1 | ITGB7 | GGGCATGGTGGCTTTGCCAA | 90 |
| G426: STAT6 N 2 | STAT6 | ACCCCACAGAGACATGATCT | 91 |
| G391: CD5 N 1 | CD5 | AGGCCAGAAACCATGCCCAT | 92 |
| G393: CCR7 N 1 | CCR7 | CCAGAGAGCGTCATGGACCT | 93 |
| G395: CD48 N 1 | CD48 | GAAGGAAGCATGTGCTCCAG | 94 |
| G366: PDCD1-N 1 | PDCD1 | TCCAGGCATGCAGATCCCAC | 95 |
| G427: STAT4 N 1 | STAT4 | TCTTTTATAGCATGTCTCAG | 96 |
| G424: STAT2 N 2 | STAT2 | CAGAGCCCAAATGGCGCAGT | 97 |
| G362: TIM3-N 1 | TIM3 | AAAGGGAAGATGTGAAAACA | 98 |
| G406: CXCR4 N 2 | CXCR4 | CTGCAAAAGAGGCAAAGGAA | 99 |
| G407: IL2 N 1 | IL2 | CAACTCCTGCCACAATGTAC | 100 |
| G411: Lck N 1 | LCK | CCCTCAGGGACCATGGGCTG | 101 |
| G416: CARD11 N 2 | CARD11 | GCCGAGTACCTGGCATGGAG | 102 |
| G539: WAS N 3 | WAS | TCCCATTGGGCCCCCACTCA | 103 |
| G420: ITGB1 N 2 | ITGB1 | ATCAGTCCAATCCAGAAAAT | 104 |
| G402: CD27 N 2 | CD27 | CCAGGGATGTGGCCGTGCCA | 105 |

Primary Immunodeficiency Panel

| gRNA ID | Target | gRNA Target Sequence | SEQ ID NO: |
|---|---|---|---|
| CD7 g1 | CD7 | TCAGCTGCACTCGCCCGGCT | 17 |
| CD7 g2 | CD7 | CCAGAAGCAGGGGCAGCAGC | 18 |
| LRBA g1 | LRBA | CCATTGCTAGCTCACGATAA | 19 |
| LRBA g2 | LRBA | CCTTTATCGTGAGCTAGCAA | 20 |
| CD40LG g1 | CD40LG | AAAGTTGAAATGGTATCTTC | 21 |
| CD40LG g2 | CD40LG | ATGCTGTGTTAAAGTTGAAA | 22 |
| MAGT1 g1 | MAGT1 | ACGTAATGTGAGGGGTCTCC | 23 |
| MAGT1 g2 | MAGT1 | GGCCCCTTGCCTTTCCTCAT | 24 |
| WASP g1 | WASP | CTTTCTGCCCTTGTCTTCTC | 25 |
| WASP g2 | WASP | ATGAGTGGGGGCCCAATGGG | 26 |
| RHOH g1 | RHOH | GGACTTCAGAGTAGGACAGC | 27 |
| RHOH g2 | RHOH | TCAGAGTAGGACAGCAGGCT | 28 |
| BCL10 g1 | BCL10 | AGGTCCTCCTCGGTGAGGGA | 29 |
| BCL10 g2 | BCL10 | CTCGGTGAGGGACGGTGCGG | 30 |
| ITGB2 g1 | ITGB2 | AGCATGTCCTGTGGAGGGAA | 31 |
| ITGB2 g2 | ITGB2 | AGGCCCAGCATGTCCTGTGG | 32 |
| IL10RA g1 | IL10RA | CTGGGCGCGCCGCATCGTCC | 33 |
| IL10RA g2 | IL10RA | GCCAGCAGCACTACGAGGCA | 34 |
| SAP g1 | SAP | CCTTGCACAGTTCTCCTCCT | 35 |
| SAP g2 | SAP | CAGCCACTGCGTCCATGGCC | 36 |
| PI3KCD g1 | PI3KCD | TTTTTAGGACAACTGTCATC | 37 |
| PI3KCD g2 | PI3KCD | TAACAACGCAGGATGCCCCC | 38 |
| CD4 g1 | CD4 | TCGGCAAGGCCACAATGAAC | 39 |
| CD4 g2 | CD4 | GCTCAGGCCCCTGCCTCCCT | 40 |
| CD5 g1 | CD5 | AGCAGGTACAAGGTGGCCAG | 41 |
| CD5 g2 | CD5 | CATGGGGTCTCTGCAACCGC | 42 |
| STAT3 g1 | STAT3 | TTGGGACCCCTGATTTTAGC | 43 |
| STAT3 g2 | STAT3 | GCTGCTGTAGCTGATTCCAT | 44 |
| ZAP70 g1 | ZAP70 | TGCTGCCGTAGAAGAAGGGC | 45 |
| ZAP70 g2 | ZAP70 | GAGATGCTGCCGTAGAAGAA | 46 |
| PI3KR1 g1 | PI3KR1 | AACCAGGCTCAACTGTTGCA | 47 |
| PI3KR1 g2 | PI3KR1 | ATTTGCAAACATGAGTGCTG | 48 |
| STIM1 g1 | STIM1 | ACGCATACATCCATGACTCT | 49 |
| STIM1 g2 | STIM1 | CAGTCAACATGCGTCTGATG | 50 |
| CD45 g1 | CD45 | CACAAATACATGGTCATATC | 51 |
| CD45 g2 | CD45 | GTATTTGTGGCTTAAACTCT | 52 |
| CD3D g1 | CD3D | GAACATAGCACGTTTCTCTC | 53 |
| CD3D g2 | CD3D | GGATGAGTTCCGCTGGGAGA | 54 |
| CD2 g1 | CD2 | ACATGGAAAGCTCATCTTAG | 55 |
| CD2 g2 | CD2 | TACATGGAAAGCTCATCTTA | 56 |
| CD3G g1 | CD3G | CCATGTCAGTCTCTGTCCTC | 57 |
| CD3G g2 | CD3G | CCGGAGGACAGAGACTGACA | 58 |
| CD3Z g1 | CD3Z | AGGGAAAGGACAAGATGAAG | 59 |
| CD3Z g2 | CD3Z | GCCTCCCAGCCTCTTTCTGA | 60 |
| CD3E g1 | CD3E | AGATGCAGTCGGGCACTCAC | 61 |
| CD3E g2 | CD3E | CCATGAAACAAAGATGCAGT | 62 |

### Example 4. SsCTS Templates Provide a Flexible and Powerful Approach to Enhance HDR in Primary Human Cells

[0163] Using optimized ssCTS designs, we next assessed performance across a broad array of genomic loci, knock-in constructs, and primary hematopoietic cell types. We evaluated CTS templates in a variety of clinically relevant primary cell types using an mCherry fusion construct targeting a gene not expected to affect cell fitness (Clathrin, CLTA). Knockin at this locus demonstrated no selective growth advantage in primary human T. ssCTS templates significantly increased knock-in efficiency, live cell counts, and absolute yield of knock-in cells across all primary human cell types evaluated here including CD4+ T cells, CD8+ T cells, regulatory T cells (Treg), NK cells, B cells, CD34+ hematopoietic stem cells (HSC) and gamma-delta T cells (γδ).

[0164] We evaluated an arrayed panel of knock-in constructs in primary human T cells targeting a detectable tNGFR fusion at the 5′ end of 22 different genes (FIG. 5A). The majority of ssCTS constructs outperformed alternative HDRT variations for both knock-in efficiency (up to 5-fold increase) and absolute knock-in counts (up to 3-fold increase) with only a few exceptions that appeared equivalent to dsCTS constructs (FIG. 5A, FIG. 3G). We next evaluated performance with a pooled library of knock-in constructs targeting an NY-ESO-1 specific TCR and additional gene products to the endogenous TRAC locus, as previously reported by our group for use in functional knock-in screens (FIG. 5B-D). Knock-in pools provide a powerful approach for high-throughput screening and allowed us to assess performance with a diverse population of large knock-in templates ranging from 2.6-3.6 kb. Knock-in efficiency and absolute knock-in counts were both increased by >5-fold in comparison to optimal dsCTS concentrations, significantly increasing coverage for each individual construct while retaining consistent representation of the initial library in the final knock-in population (FIG. 5B-D). Finally, we evaluated performance across a variety of clinically relevant primary cell types including CD4+ T cells, CD8+ T cells, regulatory T cells (Treg), NK cells, B cells, hematopoietic stem cells (HSC) and gamma-delta T cells using an mCherry knock-in construct targeting the clathrin light chain A (CLTA) gene (FIG. 5E-G). In all evaluated cell types ssCTS templates demonstrated significantly lower toxicity, increased knock-in efficiency, and generated higher absolute knock-in cell yields.

### Example 5. Evaluation of Small Molecule Inhibitors in Combination with ssCTS Templates for High-Efficiency T Cell Engineering at Primary Immunodeficiency (PID) Disease Loci

[0165] We next evaluated a panel of small molecule inhibitors reported to enhance knock-in efficiency in primary human T cells including the DNA-PK inhibitors NU7441 and M3814, the HDAC class I/II Inhibitor Trichostatin A (TSA), the CDC7 inhibitor XL413, and IDT's proprietary Alt-R HDR Enhancer which is described as a NHEJ inhibitor. Using our short ssDNA CD5-HA knock-in construct (FIG. 2A-B), each was titrated in isolation and then evaluated in combination to identify effects on knock-in efficiency and live cell counts (FIG. 6A-B). At optimal concentrations, M3814 showed the largest effect size (˜49% increase), followed by XL413 (˜46% increase), NU7441 (˜43% increase), IDT's HDR Enhancer (˜29% increase), and TSA (˜16% increase). Live cell counts were generally unaffected at the chosen concentrations except for combinations involving XL413, which demonstrated an ˜50% reduction in cell counts at day 4 post-electroporation that may reflect XL413's mechanism as a transient cell cycle inhibitor rather than overt cytotoxicity (FIG. 6B). NHEJ inhibitor combinations (M3814, NU7441, IDT HDR Enhancer) did not demonstrate further improvements above the highest individual component, consistent with overlapping mechanisms of action. In contrast, addition of TSA or XL413 did demonstrate additional improvements in combination with NHEJ inhibitors. The M3814/TSA (MT) combination provided the largest increase in knock-in efficiency without affecting live cell counts (˜65% increase) and the M3814/TSA/XL413 (MTX) combination demonstrated the highest absolute increase in knock-in efficiency (˜134% increase) albeit with XL413-mediated reduction in total cell counts. Finally, we evaluated whether the benefits of ssCTS templates and small molecule inhibitors could be combined using a variety of constructs ranging from 1.5-2.7 kb (FIG. 6C). Encouragingly, each construct demonstrated increased knock-in efficiency with ssCTS templates that was further enhanced by the inclusion of MT and MTX inhibitor combinations, in some cases generating knock-in efficiencies >90%.

[0166] We further examined repair outcomes at the genetic level by amplicon sequencing of the CD5 target locus with different versions of the small CD5-HA templates and inhibitor cocktails. Sequencing and flow-based quantifications both demonstrated stepwise increases in knock-in rates with each inhibitor that was additive to the increases seen with CTS sequences in both ssDNA and dsDNA templates. The ratio of perfect:imperfect HDR events was also similar across the different types of templates. Intriguingly, treatment combinations except for those involving XL413. All that included the M3814 DNA-PK inhibitor were associated with decreased frequency of indels (especially small indels characteristic of NHEJ), along with reduced frequency of imperfect HDR events. Inclusion of HDR templates was associated with preferential reduction in the larger deletions characteristic of MMEJ (while smaller indels characteristic of NHEJ were more refractory in the absence of DNA-PK inhibition), in agreement with recent reports.

[0167] We next asked whether small-molecule inhibitors could be combined with large ssCTS templates (ranging from 1.5-2.7 kb) to enhance knock-in engineering. Encouragingly, each ssCTS template demonstrated increased knock-in efficiencies that were enhanced further by the inclusion of MT and MTX inhibitor combinations with XL413 demonstrated an ˜50% reduction in cell counts at Day 4 and an ˜20% reduction in cell counts at Day 11. This reduction in cell count may be related to XL413's mechanism as a transient cell cycle inhibitor rather than overt cytotoxicity, in some cases generating knock-in efficiencies >90%.

[0168] Encouraged by these results, we sought to evaluate these approaches more broadly and at clinically relevant target sites that could lead toward diagnostic or therapeutic advances. We developed a panel of knock-in constructs targeting genes associated with monogenic disease-causing mutations affecting T cell function or relevant controls. These diseases are part of a spectrum of increasingly recognized genetic disorders, referred to as Primary Immunodeficiencies (PID) or Inborn Errors of Immunity (IEI), that disrupt the healthy immune system, presenting with severe infections, autoimmune disease, and malignancy. Within this panel, we examined 44 different tNGFR constructs targeting 22 genes (2 gRNA targets per gene) using ssCTS templates +/−MT and MTX inhibitor combinations (FIG. 5H). This analysis demonstrated nearly universal increases in knock-in efficiency with MT that were further enhanced with the MTX combination, achieving knock-in rates >50% for these large constructs at 15/22 genes examined and >80% at 6/22 genes. The effect size of inhibitors varied among target loci, with some sites demonstrating relatively little increase (e.g. CD7 g1) and others showing up to 7-fold increases (e.g. PI3KCD g2). Live cell counts were comparable at day 5 post-electroporation with a few notable exceptions demonstrating significant toxicity with both combinations (e.g. CD7 g2, WASP g2, CD3G g2) (FIG. 6D). Altogether these findings support broad application of ssCTS templates and inhibitor combinations at relevant disease loci, in some cases demonstrating nearly pure populations of knock-in cells (>80-90%) (FIG. 5H, FIG. 6C). This sets the stage for diagnostic and therapeutic applications of non-viral human T cell engineering that require a high purity or yield of knock-in cells at specific disease loci.

### Example 6. Universal Gene Replacement Strategies for Therapeutic and Diagnostic Human T Cell Editing

[0169] To explore potential clinical applications with large non-viral templates, we chose to examine whole open reading frame (ORF) insertions for two genes, IL2RA and CTLA4, that have been identified in families with monogenic immune disorders characterized by severe multi-organ autoimmunity. Although disease-causing mutations are widely distributed throughout these genes, many of these families could potentially be treated by a universal ORF replacement strategy (FIG. 8A, 8E). For each construct, we included a GFP fusion at the 3′ end to facilitate detection of the knock-in protein. We have previously reported targeted gene corrections for a family with loss-of-function mutations in exon 4 and exon 8 of the IL2RA gene. While we achieved knock-in efficiencies >30% with this approach, each site required a custom gRNA and HDRT which prevents extension to families with alternative IL2RA mutations. In contrast, a whole ORF knock-in at exon 1 of the IL2RA gene could potentially ameliorate any of the 11 previously reported mutations causing IL2RA deficiency (FIG. 8A). Using a ssCTS template and the MTX inhibitor combination, we achieved >80% knock-in of a ˜2.3 kb whole ORF IL2RA-GFP fusion construct (FIG. 8B). The knock-in protein demonstrated nearly indistinguishable expression levels compared to endogenous protein. This whole ORF knock-in approach could allow for rapid functional testing and characterization of patient mutations or variants of unknown significance (VUS). To demonstrate this diagnostic potential, we modified the knock-in construct to encode a previously described disease-causing mutation in exon 4 of IL2RA, c.497 G>A (S166N), which was reported to eliminate surface expression while retaining cytoplasmic protein. In agreement with what has been reported in patient cells, we found that the GFP+S166N population demonstrates a near complete absence of surface IL2RA with readily detectable intracellular IL2RA comparable to WT levels (FIG. 8C, FIG. 7A). Fluorescence microscopy revealed that S166N protein formed distinct perinuclear aggregates consistent with intracellular retention and contrasting with the diffuse cytoplasmic and surface T1L2RA seen with WT knock-ins (FIG. 81D). These results highlight the diagnostic and therapeutic potential of targeted ORF insertion within the endogenous gene, an approach which may be extended to include a number of alternative targets or additional noncoding elements.

[0170] As a further example, we examined an ORF insertion within the CTLA4 gene (FIG. 8E). CTLA4 deficiency is caused most frequently by a haploinsufficiency with a disease-causing mutation on only 1 of 2 alleles. Exon-targeting strategies generate indels which could disrupt the normal allele and worsen disease. To avoid this possibility, we screened a panel of gRNA in intron 1, set forth in Table 3, to identify targets which cut efficiently without disrupting protein expression (FIG. 7B).

TABLE 3

| | | SEQ | %CTLA4 protein | |
|---|---|---|---|---|
| | | ID | loss above | |
| | gRNA target sequence | NO: | background | %indel |
| G509: | CCTTGTGCCGCTGAAATCCA | 63 | 39.2 | 78.2 |
| CTLA4e1-1 | | | | |
| G510: | CCTTGGATTTCAGCGGCACA | 64 | 16.65 | 47.7 |
| CTLA4e1-2 | | | | |
| G511: | GCACAAGGCTCAGCTGAACC | 65 | 32.4 | 71.85 |
| CTLA4e1-3 | | | | |
| G512: | CTCAGCTGAACCTGGCTACC | 66 | 1.3 | 12.15 |
| CTLA4e1-4 | | | | |
| G513: | TGAACCTGGCTACCAGGACC | 67 | 10.2 | 23.7 |
| CTLA4e1-5 | | | | |
| G514: | AGAAAAAACAGGAGAGTGCA | 68 | 47.45 | 94.35 |
| CTLA4e1-6 | | | | |
| G515: | TTGTATGCCAAACAGACTGG | 69 | 0 | 79.25 |
| CTLA4i1-1 | | | | |
| G516: | TGCATCTGAAACCCACACGT | 70 | 0 | 61.95 |
| CTLA4i1-2 | | | | |
| G517: | CTCTGAAGAGCTGAAAACTG | 71 | 0 | 80.35 |
| CTLA4i1-3 | | | | |
| G518: | GAAAAAAATGAAGGACATGG | 72 | 0 | 84.15 |
| CTLA4i1-4 | | | | |
| G519: | ACATATTTCATGGTAGAGCC | 73 | 0 | 89.65 |
| CTLA4i1-5 | | | | |
| G520: | GATATGACAAACAGAAGACC | 4 | 0 | 72.5 |
| CTLA4i1-6 | | | | |

[0171] The chosen gRNA had no detectable disruption of endogenous CTLA4 protein and the associated ORF knock-in construct generated knock-in efficiencies of 70-80% with ssCTS templates and MTX inhibitor combination (FIG. 9F-G). This intron-targeting strategy could be used to introduce or correct the majority of reported disease-causing mutations in CTLA4 excluding those upstream of the target site (FIG. 9E). Variations in protein expression by cell type and in response to stimulation matched the endogenous protein, although basal knock-in protein levels were slightly higher which may reflect differences between the SV40 3′UTR used in this construct and the endogenous 3′UTR (FIG. 7C). To evaluate diagnostic capabilities with known CTLA4 mutations, we generated knock-in constructs with 3 previously reported disease-causing mutations: R70W, R75W, and T124P. Cells were gated for the highest levels of GFP expression to enrich for homozygous knock-ins and then evaluated for surface protein, intracellular protein, and ligand binding using recombinant CD80 in activated CD4+ T cells (FIG. 7D, FIG. 8G-I). All three mutations significantly reduced ligand binding despite variable levels of surface expression, in agreement with prior reports demonstrating reduced ligand uptake in heterozygous patient cells or engineered cell lines. Altogether, these approaches provide a powerful method for evaluating patient mutations at endogenous loci with the potential for adaptation to high-throughput screening and high efficiency therapeutic gene replacement strategies.

### Example 7. Development of a GMP-Compatible Manufacturing Process for Non-Viral Genome Engineered T Cell Therapies

[0172] Finally, we sought to generate a clinical-grade process for fully non-viral knock-in of large therapeutic constructs. One of the most immediate applications with demonstrated functional benefit is targeting a CAR insertion to the endogenous TRAC locus. This approach greatly enhanced the potency of CD19-specific CAR-T cells in preclinical studies and reduced T cell exhaustion through tightly regulated expression driven by the gene regulatory elements governing normal TCR expression. In contrast to the original rAAV-mediated methods, we adapted this strategy to make use of ssCTS templates targeting the BCMA antigen, a promising target for treatment of Multiple Myeloma that has recently seen FDA-approval for viral CAR-T products (FIG. 1F). Clinical translation requires transitioning to Good Manufacturing Practice (GMP) compliant reagents, equipment, and processes. For electroporations, we used the Maxcyte GTx platform which provides a GMP-compatible electroporation device with access to FDA Master File along with sterile single-use cuvettes and assemblies that are scalable to the large numbers of cells needed for manufacturing a full patient dose. For genome editing reagents, we used research-grade equivalents that are each available at GMP-grade, including SpyFi Cas9 (a high fidelity Cas9 variant produced at GMP-grade by Aldevron) and chemically synthesized sgRNA also produced at GMP-grade by Synthego. We partnered with Genscript to develop a GMP-compatible process for ssCTS template generation. Encouragingly, Genscript templates encoding a BCMA-CAR knock-in were able to be manufactured at large scale and consistently outperformed our internally generated HDRTs, showing lower levels of toxicity and higher knock-in efficiencies for both ssCTS and dsCTS constructs (FIG. 10A).

[0173] To demonstrate a large-scale non-viral CAR T manufacturing process, ˜100×10⁶ primary human T cells were isolated from two healthy donors, activated on Day 0 with CD3/CD28 Dynabeads along with IL-7 and IL-15, electroporated on Day 2 using Maxcyte R-1000 cuvettes, then expanded in G-Rex 100M gas permeable culture vessels to Day 7 or Day 10 (FIG. 9A). Average knock-in efficiencies were 40.4% on Day 7 and 45.8% on Day 10. The final yield of CAR+ cells was >5×10⁸ by Day 7 and >1.5×10⁹ by Day 10 for both donors, well within the range needed to generate a full patient dose of ˜100×10⁶ CAR+ cells (FIG. 9B-D). While the addition of small molecule inhibitors improved knock-in efficiencies to >60%, we observed a reduction in live cell counts such that the final yield of CAR+ cells were decreased in comparison to ssCTS templates alone (FIG. 9 B-D, FIG. 10C-D). The majority of CAR+ cells demonstrated an immunophenotype consistent with a T stem cell memory (Tscm) population on day 10 of expansion based on CD45RA/CD62L expression and confirmed with additional markers as CD45RA⁺CD62L⁺CD45RO⁻CCR7⁺CD95⁺ (FIG. 9E, FIG. 10B-C). In vitro assays demonstrated efficient killing of BCMA+MM1S myeloma cell lines in contrast to unmodified T cells expanded from the same donors (FIG. 9F). Altogether, these results demonstrate a fully non-viral manufacturing process capable of high efficiency T cell engineering at clinical scale which may be transitioned to full-GMP manufacturing and quickly adapted toward additional targets.

[0174] The ability of CRISPR genome engineering to introduce targeted sequence replacements or insertions in primary human cells holds immense promise for studying disease variants, correction of genetic diseases, and reprogramming cellular functions for the next-generation of cell-based therapeutics. Here we report advances that improve HDR efficiency and yield with large non-viral ssCTS templates and small molecule inhibitor combinations. We apply this technology across diverse genetic loci, knock-in constructs, and primary hematopoietic cell types, demonstrating their utility for the generation of universal gene correction strategies, disease variant modeling, and GMP-compatible manufacturing processes.

[0175] ssCTS hybrid repair templates—alone or in combination with small molecule inhibitors—provide a broadly useful tool to promote CRISPR-based HDR. The technology reported here demonstrated >7-fold increases at some sites. However, by testing knock-in across a broad array of target sites, we did observe variation even with different RNPs targeting the same gene. Variable knock-in rates and toxicity could be affected by unique features of the target site (or off-target effects) at the local sequence or epigenetic level. Recent work has highlighted that some gRNA targets exhibit distinct repair pathway preferences. A detailed analysis of repair outcomes at the sequence level, reliance on alternative repair pathways, and evaluation of off-target effects may help identify the source of this variability and inform future design of genome targeting strategies.

[0176] The relatively high purity and high yield of live cells achieved here with large genome replacements provides a powerful tool to probe DNA sequence function in primary human cells. We can now directly test the function of individual coding or non-coding genome sequences for mechanistic studies or to confirm the clinical relevance of disease variants. The most recent classification of Inborn Errors of Immunity (aka Primary Immunodeficiencies or PID) from the 2019 International Union of Immunological Societies (IUIS) update identifies >400 monogenic immune disorders with 65 new genes implicated since 2017. Families with these diseases demonstrate a spectrum of mutations scattered throughout these genes and interpretation of novel variants of unknown significance (VUS) is a persistent challenge to diagnosis and appropriate patient management. Routine interrogation of these VUS at endogenous loci within the relevant primary human cell type may now be feasible. Here we demonstrate application of our non-viral approaches at a variety of PID-associated genes, in some cases achieving knock-in efficiencies >80% without selection and allowing us to evaluate the functional consequences of disease-causing mutations within primary human T cells. We further demonstrate the ability to extend these approaches to alternative hematopoietic cell types and large knock-in pools, providing a foundation for high-throughput functional screens that may be used to examine the immense variety of PID-associated genetic variants.

[0177] Enhanced CRISPR-based genome targeting with ssCTS templates also provides opportunities to re-write sequences in primary somatic cells to treat patients. Here we show the potential of non-viral approaches to generate high-efficiency universal open reading frame (ORF) replacements for two genes, IL2RA and CTLA4, both associated with severe autoimmunity and immune dysfunction affecting primary human T cells. Flexible, non-viral gene replacement strategies—in hematopoietic stem and progenitor cells or in more terminally differentiated cell types such as T cells—could give more patients access to curative cellular therapies. More broadly, the ability to efficiently knock-in large sequences into specified genome locations opens the door to synthetic reprogramming to generate powerful cellular medicines. Here we demonstrate clinical-scale, non-viral manufacturing of T cells engineered to have chimeric antigen receptors (CARS) expressed under the gene regulatory control of endogenous TCR-alpha, which has been reported to have favorable properties. Eventually, this process should support robust manufacturing of even more complex synthetic gene programs integrated into targeted genome sites to drive potent cell therapy functions for diverse, complex human diseases.

[0178] Altogether, we have developed a variety of tools and applications that markedly improve non-viral genome editing and demonstrate the power of these methods to correct, modify, and reprogram primary human cells. We have applied these approaches predominantly toward genome targets relevant for human T cell editing, demonstrating applications for functional genetic screens or therapeutic genome engineering. However, we also show the feasibility of applying ssCTS templates to a range of relevant human cell types and these approaches may be extended for many alternative applications, including targeting the >400 genes associated with a PID or incorporation of a wide variety of novel synthetic biology constructs. These studies demonstrate the capacity of fully non-viral HDR to mediate complex and targeted genome modifications with high efficiency and yield, which is advantageous for a number of research, diagnostic, and manufacturing applications.

### Example 8. Chemical Control of DNA Repair Pathways

[0179] Many genome editing approaches make use of nucleases such as Cas9 to generate targeted genomic double-stranded DNA (dsDNA) breaks. These breaks, in turn, drive a variety of DNA repair pathways including non-homologous end joining (NHEJ), microhomology-mediated end joining (MMEJ), or homology directed repair (HDR), which may be harnessed to generate the desired genetic outcome. For multiplexed genome editing, it is frequently desirable to achieve high rates of HDR to generate a “knock-in” at one locus, while simultaneously generating high rates of “knock-out” at alternative genetic loci in order to perform functional screens or improve the safety or performance of cellular therapies.

[0180] A knock-in is generated by inclusion of high concentrations of homology directed repair templates (HDRTs) with the intended genetic insert flanked by homology arms matching the target site. Knock-outs occur when no HDRT is available by either NHEJ or MMEJ repair pathways. NHEJ leads to small insertions or deletions (indels) surrounding the cut site, while MMEJ leads to larger deletions driven by microhomologies surrounding the genomic break which remove the intervening sequence during repair. Because NHEJ indels are small and many remain in-frame, they are less likely to disrupt the final gene product. MMEJ is thus a preferable outcome for disrupting a gene and HDR is preferred for generating a knock-in.

[0181] These three pathways compete with each other to repair a genomic break, and, here, we demonstrate that using small molecule inhibitors (M3814, NU7441, TSA, and XL413), in isolation or in combination, can drive repair away from less desirable NHEJ outcomes and toward either MMEJ or HDR depending on whether an HDRT is present for each individual target site. With multiplexed editing, this leads to synergistic increases in both knockout and knock-in. The magnitude of both these effects are enhanced by inclusion of each additional inhibitor.

[0182] FIG. 11 shows the results of T cells from two independent, healthy donors that were electroporated with RNPs targeting exon 1 of IL2RA. The left column represents cells that were grown in medium and IL-2, while the right column shows samples that were grown in medium, IL-2, M3814, and TSA. Twenty-four hours after electroporations, media from all samples was replaced with fresh growth media and IL-2. Six days after electroporations, cells were collected, stained with fluorescent antibodies, and analyzed by flow cytometry. The samples treated with M3814 and TSA show increased protein knockout of surface CD25 expression.

[0183] FIG. 12 shows results of T cells from two independent, healthy donors that were electroporated with RNPs targeting exon 1 of IL2RA and immediately treated with either growth media and IL-2 or growth media, IL-2, M3814, and TSA as indicated. Media was refreshed after 24 hours in all samples, and cells were resuspended in growth media and IL-2. Six days after electroporations, genomic DNA was isolated from samples and amplicons were generated using PCR. Amplicons were sequenced and analyzed using TIDE (Tracking of Indels by Decomposition) to determine distinct changes in indel spectrums. The addition of inhibitors abolished almost all small indel outcomes that are characteristic of NHEJ repair pathways and selectively enabled and enriched for much larger deletions that are characteristic of MMEJ repairs. Additionally, the cutting efficiency of G377 is not impacted by the addition of inhibitors, and thus, cannot be attributed to the increased protein knockout observed in FIG. 1.

[0184] FIG. 13 shows amplicons analyzed by TIDE, from FIG. 12, aligned to human genome assembly GRCh38. Pictured are alignments of a sample treated with growth media, IL-2, M3814, and TSA for 24 hours after being electroporated with RNPs targeting IL2RA. As indicated from the indel spectrums in FIG. 3, a fifteen base-pair deletion was detected in the alignment. 5 bases of microhomology flank the deletion (highlighted in yellow) consistent with an MMEJ repair outcome.

[0185] FIG. 14 shows the results of T cells from two independent healthy donors that were electroporated with RNPs targeting the TRAC locus. Following electroporations, cells were either grown in media and IL-2 or media, IL-2, M3814, and TSA for twenty-four hours. After twenty-four hours, media was removed and fresh IL-2 and growth media was added to all samples. Cells were collected five days after electroporations, stained with fluorescent antibodies for phenotyping, and analyzed by flow cytometry. The samples treated with inhibitors increase T cell receptor knockout, reaching up to 99.6% knockout.

[0186] FIG. 15 shows the results of T cells from two independent, healthy donors that were electroporated with RNPs targeting the TRAC locus, and grown for twenty-four hours in either media and IL-2 or media, IL-2, M3814, and TSA as indicated. After twenty-four hours, media was removed and cells were resuspended in fresh media and IL-2. Four days after electroporations, cells were collected and genomic DNA was extracted from each sample prior to the generation of PCR amplicons containing the edited site. Amplicons were sequenced and then analyzed with TIDE to generate indel spectrums. Samples treated without inhibitors demonstrate a mix of small indels (characteristic of NHEJ) and a large 32 base pair deletion (characteristic of MMEJ). Samples that were treated with inhibitors displayed no small indels and, instead, almost entirely displayed 32 base pair deletions that can be attributed to MMEJ repair pathways.

[0187] FIG. 16 shows the sequence of samples analyzed by TIDE, from FIG. 15, aligned to the human genome assembly GRCh38. Pictured is an alignment of a sample treated growth media, IL-2, M3814, and TSA for 24 hours following electroporation. As indicated in the indel spectrums in FIG. 5, a 32 base pair deletion is evident, and this deleted region is flanked by homologous 8 base pair sequences, consistent with dominant MMEJ repair.

[0188] FIG. 17 shows the results of T cells from two independent, healthy donors that were electroporated with RNPs and ssODN HDRT encoding a HA-Tag targeted to the N-terminus of CD5. Cells were then treated with the indicated combinations of each inhibitor in growth media and IL-2. After twenty-four hours, media was removed from all samples and fresh media and IL-2 was added. At the indicated time points after electroporations (four, six, or eleven days), cells were collected, stained with fluorescent antibodies, and analyzed by flow cytometry for phenotyping and knock-in quantification. We found that each chemical not only increased HDR efficiencies (both when used alone and in combinations) but also accelerated the kinetics of HDR events. The combined usage of all four molecules allowed for knock-in efficiencies to reach maximal levels (measured by HA-Tag expression) four days after electroporations while samples not treated with inhibitors reached maximal levels six days after electroporations.

[0189] Altogether, the data demonstrate that desirable DNA repair outcomes in various gene editing scenarios can be directed using small molecules alone or in combination. Specific benefits include increased HDR integration efficiencies with the combinations of M3814, NU7441, TSA, and XL413, enhanced protein knockout efficiencies, and selectively leveraging MMEJ repair pathways to induce large deletion that may enable greater ease when dissecting both coding and non-coding regions of DNA in genetic screens.

### Sequences

[0190] HDRT sequence sequences are provided below, directly followed, is used for the HDRT, by 5′ CTS RC and 3′ CTS RC oligonucleotide sequences. “NA” means no CTS oligonucleotide was used for the specified HDRT. The first sequence listed after the HDRT sequence is the 5′ CTS RC oligonucleotide and the second sequence after the HDRT sequence is the 3′ CTS RC oligonucleotide sequence.

Lengthy table referenced here
US20250290099A1-20250918-T00001
Please refer to the end of the specification for access instructions.

[0191] Although the foregoing has been described in some detail by way of illustration and example for purposes of clarity and understanding, one of skill in the art will appreciate that certain changes and modifications can be practiced within the scope of the appended claims. In addition, each reference provided herein is incorporated by reference in its entirety to the same extent as if each reference was individually incorporated by reference.

LENGTHY TABLES
The patent application contains a lengthy table section. A copy of the table is available in electronic form from the USPTO web site (https://seqdata.uspto.gov/?pageRequest=docDetail&DocID=US20250290099A1). An electronic copy of the table will also be available from the USPTO upon request and payment of the fee set forth in 37 CFR 1.19(b)(3).

1. A method of editing the genome of a cell, the method comprising inserting a nucleic acid sequence of an exogenous partial open reading frame (ORF) of an autosomal dominant gene into an intronic target region of an endogenous autosomal dominant gene in the cell, wherein:
the endogenous autosomal dominant gene comprises one or more disease-causing mutations,
the exogenous partial ORF of the autosomal dominant gene is free of disease-causing mutations, and
insertion of the exogenous partial ORF of the autosomal dominant gene into the intronic target region results in a modified autosomal dominant gene that encodes a protein which is free of disease-causing mutations.

2. The method of claim 1, wherein the autosomal dominant gene is CTLA4, and wherein insertion of an exogenous CLTA4 partial ORF into the intronic target region of an endogenous CLTA4 gene results in a modified CTLA4 gene that encodes a CTLA4 protein which is free of disease-causing mutations.

3. The method of claim 2, wherein the intronic target region is in intron 1 of the endogenous CTLA4 gene and the exogenous CTLA4 partial ORF comprises exons 2-4 of CTLA4.

4. (canceled)

5. The method of claim 2, wherein the nucleic acid sequence of the exogenous CTLA4 partial ORF is inserted into the intronic target region by introducing into the cell: (a) a targeted nuclease that creates an insertion site in the intronic target region; (b) a guide RNA that specifically hybridizes to the intronic target region; and (c) a DNA template comprising the nucleic acid sequence of the exogenous CTLA4 partial ORF.

6. The method of claim 5, wherein:
the DNA template is a single-stranded DNA template,
the 5′ end and the 3′ end of the DNA template comprise nucleotide sequences that are homologous to genomic sequences flanking the intronic target region,
the DNA template further comprises a nuclease binding sequence, wherein the nuclease binding sequence forms a double-stranded duplex with a complementary nucleotide sequence.

7. The method of claim 6, wherein the double-stranded duplex is formed with an oligonucleotide or polynucleotide comprising the complementary nucleotide sequence.

8. The method of claim 5, wherein the targeted nuclease is a Cas9 nuclease.

9. The method of claim 5, wherein the targeted nuclease, the guide RNA, and the DNA template are introduced into the cell as a ribonucleoprotein complex (RNP)-DNA template complex.

10. (canceled)

11. The method of claim 5, wherein the targeted nuclease, the guide RNA, and the DNA template are introduced into the cell in the presence of one or more small molecules selected from the group consisting of a DNA-dependent protein kinase (DNA-PK) inhibitor, a histone deacetylase (HDAC) inhibitor, and a cell division cycle 7-related protein kinase (CDC7) inhibitor.

12-14. (canceled)

15. The method of claim 1, further comprising administering the cell comprising the modified autosomal dominant gene to a human subject.

16. The method of claim 15, wherein the subject is same subject from whom the cell having the endogenous autosomal dominant gene was obtained.

17. (canceled)

18. The method of claim 1, wherein the cell is a T cell or a hematopoietic stem cell.

19. An isolated cell having an edited genome, which is prepared according to the method of claim 1.

20. An isolated cell having an edited genome comprising a modified CTLA4 gene comprising an CTLA4 open reading frame (ORF) comprising an endogenous exon 1 and exogenous exons 2-4, wherein the exogenous exons are free of disease-causing mutations.

21. (canceled)

22. The isolated cell of claim 20, which is a T cell or a hematopoietic stem cell.

23. A method for treating a haploinsufficiency, the method comprising administering a therapeutically effective amount of cells according to claim 19 to a subject in need thereof.

24. The method of claim 23, wherein the haploinsufficiency causes a primary immunodeficiency.

25. (canceled)

26. (canceled)

27. A method for modifying a target gene in a cell, the method comprising:
electroporating the cell in the presence of:
(a) a ribonucleoprotein (RNP) complex comprising a guide RNA and a targeted nuclease, wherein the guide RNA specifically hybridizes to a nucleotide sequence in a genomic target region and the targeted nuclease creates an insertion site in the genomic target region;
(b) a single-stranded DNA template comprising an exogenous nucleic acid sequence, wherein the 5′ end and the 3′ end of the DNA template comprise nucleotide sequences that are homologous to genomic sequences flanking the genomic target region, and wherein the DNA template further comprises a nuclease binding sequence, wherein the nuclease binding sequence forms a double-stranded duplex with a complementary nucleotide sequence; and
(c) one or more molecules selected from the group consisting of a DNA-dependent protein kinase (DNA-PK) inhibitor, a histone deacetylase (HDAC) inhibitor, and a cell division cycle 7-related protein kinase (CDC7) inhibitor,
thereby modifying the target gene.

28. The method of claim 27, wherein the DNA-PK inhibitor is (S)-(2-chloro-4-fluoro-5-(7-morpholinoquinazolin-4-yl)phenyl)(6-methoxypyridazin-3-yl)methanol (M3814) or 8-(dibenzo[b,d]thiophen-4-yl)-2-morpholino-4H-chromen-4-one (NU7441); and/or
the HDAC inhibitor is [R-(E,E)]-7-[4-(dimethylamino)phenyl]-N-hydroxy-4,6-dimethyl-7-oxo-2,4-heptadienamide (trichostatin A); and/or
the CDC7 inhibitor is (S)-8-chloro-2-(pyrrolidin-2-yl)benzofuro[3,2-d]pyrimidin-4(3H)-one hydrochloride (XL413).

29-34. (canceled)

35. The method of claim 27, wherein the human cell is a T cell or a hematopoietic stem cell.

The application's sequence listing, which the Patent Office published only in electronic form, follows.

SEQUENCE LISTING (452 sequences)

SEQ ID NO: 1 - DNA, 2044 bp, synthetic construct
  source 1..2044: mol_type = other DNA
ctattgacaaacagaagacccggtacagtgcatcaagacacagctactcctgggtgacagaggttcagggccagctcactaagtaggcagaagtttttgacatatactttgagagataaagcaagattctgtacctcaaccttcagaatttcccctaccactcattatagttccggagctatatagctcctatcattctatcataaccttagaataccagagaacatatcatctcatctaattatctcttactatatgtgaaaaaaatgaaggacatgggggaagtgtgacttgccccaaatcacatatttcatggtagagggctgggcttggccatgaaggagcatgagttcactgagttccctttggcttttccatgctagcaatgcacgtggcccagcctgctgtggtactggccagcagccgaggcatcgccagctttgtgtgtgagtatgcatctccaggcaaagccactgaggtccgggtgacagtgcttcggcaggctgacagccaggtgactgaagtctgtgcggcaacctacatgatggggaatgagttgaccttcctagatgattccatctgcacgggcacctccagtggaaatcaagtgaacctcactatccaaggactgagggccatggacacgggactctacatctgcaaggtggagctcatgtacccaccgccatactacctgggcataggcaacggaacccagatttatgtaattgatccagaaccgtgcccagattctgacttcctcctctggatccttgcagcagttagttcggggttgtttttttatagctttctcctcacagctgtttctttgagcaaaatgctaaagaaaagaagccctcttacaacaggggtctatgtgaaaatgcccccaacagagccagaatgtgaaaagcaatttcagccttattttattcccatcaatggatctggaggaactagcggcagcaagggcgaggagctgttcaccggggtggtgcccatcctggtcgagctggacggcgacgtaaacggccacaagttcagcgtgcgcggcgagggcgagggcgatgccaccaacggcaagctgaccctgaagttcatctgcaccaccggcaagctgcccgtgccctggcccaccctcgtgaccaccctgacctacggcgtgcagtgcttcagccgctaccccgaccacatgaagcgccacgacttcttcaagtccgccatgcccgaaggctacgtccaggagcgcaccatcagcttcaaggacgacggcacctacaagacccgcgccgaggtgaagttcgagggcgacaccctggtgaaccgcatcgagctgaagggcatcgacttcaaggaggacggcaacatcctggggcacaagctggagtacaacttcaacagccacaacgtctatatcaccgccgacaagcagaagaacggcatcaaggccaacttcaagatccgccacaacgtggaggacggcagcgtgcagctcgccgaccactaccagcagaacacccccatcggcgacggccccgtgctgctgcccgacaaccactacctgagcacccagtccgtgctgagcaaagaccccaacgagaagcgcgatcacatggtcctgctggagttcgtgaccgccgccgggatcacttgacaccgggtcttcaacttgtttattgcagcttataatggttacaaataaagcaatagcatcacaaatttcacaaataaagcatttttttcactgcattctagttgtggtttgtccaaactcatcaatgtatcttatcatgtctggaagacctgtttacctcttctgtttgtcatatcagtgttcttcctgccacaaccatcttgaagaatctatttctcagtaagaaaatatctttatggagagtagctggaaaacagttgagagatggaggggaggctgggggtgtggagaggggaaggggtaagtgatagattcgttgaaggggggagaaaaggccgtggggatgaagctagaaggcagaagggctccgggtcttctgtttgtcaatag

SEQ ID NO: 2 - DNA, 43 bp, synthetic construct
  source 1..43: mol_type = other DNA
ctgtgtcttgatgcactgtaccgggtcttctgtttgtcaatag

SEQ ID NO: 3 - DNA, 41 bp, synthetic construct
  source 1..41: mol_type = other DNA
ctattgacaaacagaagacccggagcccttctgccttctag

SEQ ID NO: 4 - DNA, 20 bp, synthetic construct
  source 1..20: mol_type = other DNA
gatatgacaaacagaagacc

SEQ ID NO: 5 - RNA, 74 nt, synthetic construct
  source 1..74: mol_type = other RNA
aacagcatagcaagttaaaataaggctagtccgttatcaacttgaaaaagtggcaccgagtcggtgcttttttt

SEQ ID NO: 6 - protein, 20 aa, synthetic construct
AVKRPAATKKAGQAKKKKLD

SEQ ID NO: 7 - protein, 25 aa, synthetic construct
MSRRRKANPTKLSENAKKLAKEVEN

SEQ ID NO: 8 - protein, 9 aa, synthetic construct
PAAKRVKLD

SEQ ID NO: 9 - protein, 9 aa, synthetic construct
KLKIKRPVK

SEQ ID NO: 10 - protein, 7 aa, synthetic construct
PKKKRKV

SEQ ID NO: 11 - DNA, 100 bp, synthetic construct
  source 1..100: mol_type = other DNA
ttagctctgtttacgtcccagcgggcatgagagtaacaagagggtgtggtaatattacggtaccgagcactatcgatacaatatgtgtcatacggacacg

SEQ ID NO: 12 - DNA, 20 bp, synthetic construct
  source 1..20: mol_type = other DNA
gaacggatccagctcagcca

SEQ ID NO: 13 - DNA, 20 bp, synthetic construct
  source 1..20: mol_type = other DNA
tgagcagtccccacatcagc

SEQ ID NO: 14 - DNA, 20 bp, synthetic construct
  source 1..20: mol_type = other DNA
cagtcgcttcctgcctcgga

SEQ ID NO: 15 - DNA, 20 bp, synthetic construct
  source 1..20: mol_type = other DNA
tcagggttctggatatctgt

SEQ ID NO: 16 - DNA, 20 bp, synthetic construct
  source 1..20: mol_type = other DNA
ctggatatctgtgggacaag

SEQ ID NO: 17 - DNA, 20 bp, synthetic construct
  source 1..20: mol_type = other DNA
tcagctgcactcgcccggct

SEQ ID NO: 18 - DNA, 20 bp, synthetic construct
  source 1..20: mol_type = other DNA
ccagaagcaggggcagcagc

SEQ ID NO: 19 - DNA, 20 bp, synthetic construct
  source 1..20: mol_type = other DNA
ccattgctagctcacgataa

SEQ ID NO: 20 - DNA, 20 bp, synthetic construct
  source 1..20: mol_type = other DNA
cctttatcgtgagctagcaa

SEQ ID NO: 21 - DNA, 20 bp, synthetic construct
  source 1..20: mol_type = other DNA
aaagttgaaatggtatcttc

SEQ ID NO: 22 - DNA, 20 bp, synthetic construct
  source 1..20: mol_type = other DNA
atgctgtgttaaagttgaaa

SEQ ID NO: 23 - DNA, 20 bp, synthetic construct
  source 1..20: mol_type = other DNA
acgtaatgtgaggggtctcc

SEQ ID NO: 24 - DNA, 20 bp, synthetic construct
  source 1..20: mol_type = other DNA
ggccccttgcctttcctcat

SEQ ID NO: 25 - DNA, 20 bp, synthetic construct
  source 1..20: mol_type = other DNA
ctttctgcccttgtcttctc

SEQ ID NO: 26 - DNA, 20 bp, synthetic construct
  source 1..20: mol_type = other DNA
atgagtgggggcccaatggg

SEQ ID NO: 27 - DNA, 20 bp, synthetic construct
  source 1..20: mol_type = other DNA
ggacttcagagtaggacagc

SEQ ID NO: 28 - DNA, 20 bp, synthetic construct
  source 1..20: mol_type = other DNA
tcagagtaggacagcaggct

SEQ ID NO: 29 - DNA, 20 bp, synthetic construct
  source 1..20: mol_type = other DNA
aggtcctcctcggtgaggga

SEQ ID NO: 30 - DNA, 20 bp, synthetic construct
  source 1..20: mol_type = other DNA
ctcggtgagggacggtgcgg

SEQ ID NO: 31 - DNA, 20 bp, synthetic construct
  source 1..20: mol_type = other DNA
agcatgtcctgtggagggaa

SEQ ID NO: 32 - DNA, 20 bp, synthetic construct
  source 1..20: mol_type = other DNA
aggcccagcatgtcctgtgg

SEQ ID NO: 33 - DNA, 20 bp, synthetic construct
  source 1..20: mol_type = other DNA
ctgggcgcgccgcatcgtcc

SEQ ID NO: 34 - DNA, 20 bp, synthetic construct
  source 1..20: mol_type = other DNA
gccagcagcactacgaggca

SEQ ID NO: 35 - DNA, 20 bp, synthetic construct
  source 1..20: mol_type = other DNA
ccttgcacagttctcctcct

SEQ ID NO: 36 - DNA, 20 bp, synthetic construct
  source 1..20: mol_type = other DNA
cagccactgcgtccatggcc

SEQ ID NO: 37 - DNA, 20 bp, synthetic construct
  source 1..20: mol_type = other DNA
tttttaggacaactgtcatc

SEQ ID NO: 38 - DNA, 20 bp, synthetic construct
  source 1..20: mol_type = other DNA
taacaacgcaggatgccccc

SEQ ID NO: 39 - DNA, 20 bp, synthetic construct
  source 1..20: mol_type = other DNA
tcggcaaggccacaatgaac

SEQ ID NO: 40 - DNA, 20 bp, synthetic construct
  source 1..20: mol_type = other DNA
gctcaggcccctgcctccct

SEQ ID NO: 41 - DNA, 20 bp, synthetic construct
  source 1..20: mol_type = other DNA
agcaggtacaaggtggccag

SEQ ID NO: 42 - DNA, 20 bp, synthetic construct
  source 1..20: mol_type = other DNA
catggggtctctgcaaccgc

SEQ ID NO: 43 - DNA, 20 bp, synthetic construct
  source 1..20: mol_type = other DNA
ttgggacccctgattttagc

SEQ ID NO: 44 - DNA, 20 bp, synthetic construct
  source 1..20: mol_type = other DNA
gctgctgtagctgattccat

SEQ ID NO: 45 - DNA, 20 bp, synthetic construct
  source 1..20: mol_type = other DNA
tgctgccgtagaagaagggc

SEQ ID NO: 46 - DNA, 20 bp, synthetic construct
  source 1..20: mol_type = other DNA
gagatgctgccgtagaagaa

SEQ ID NO: 47 - DNA, 20 bp, synthetic construct
  source 1..20: mol_type = other DNA
aaccaggctcaactgttgca

SEQ ID NO: 48 - DNA, 20 bp, synthetic construct
  source 1..20: mol_type = other DNA
atttgcaaacatgagtgctg

SEQ ID NO: 49 - DNA, 20 bp, synthetic construct
  source 1..20: mol_type = other DNA
acgcatacatccatgactct

SEQ ID NO: 50 - DNA, 20 bp, synthetic construct
  source 1..20: mol_type = other DNA
cagtcaacatgcgtctgatg

SEQ ID NO: 51 - DNA, 20 bp, synthetic construct
  source 1..20: mol_type = other DNA
cacaaatacatggtcatatc

SEQ ID NO: 52 - DNA, 20 bp, synthetic construct
  source 1..20: mol_type = other DNA
gtatttgtggcttaaactct

SEQ ID NO: 53 - DNA, 20 bp, synthetic construct
  source 1..20: mol_type = other DNA
gaacatagcacgtttctctc

SEQ ID NO: 54 - DNA, 20 bp, synthetic construct
  source 1..20: mol_type = other DNA
ggatgagttccgctgggaga

SEQ ID NO: 55 - DNA, 20 bp, synthetic construct
  source 1..20: mol_type = other DNA
acatggaaagctcatcttag

SEQ ID NO: 56 - DNA, 20 bp, synthetic construct
  source 1..20: mol_type = other DNA
tacatggaaagctcatctta

SEQ ID NO: 57 - DNA, 20 bp, synthetic construct
  source 1..20: mol_type = other DNA
ccatgtcagtctctgtcctc

SEQ ID NO: 58 - DNA, 20 bp, synthetic construct
  source 1..20: mol_type = other DNA
ccggaggacagagactgaca

SEQ ID NO: 59 - DNA, 20 bp, synthetic construct
  source 1..20: mol_type = other DNA
agggaaaggacaagatgaag

SEQ ID NO: 60 - DNA, 20 bp, synthetic construct
  source 1..20: mol_type = other DNA
gcctcccagcctctttctga

SEQ ID NO: 61 - DNA, 20 bp, synthetic construct
  source 1..20: mol_type = other DNA
agatgcagtcgggcactcac

SEQ ID NO: 62 - DNA, 20 bp, synthetic construct
  source 1..20: mol_type = other DNA
ccatgaaacaaagatgcagt

SEQ ID NO: 63 - DNA, 20 bp, synthetic construct
  source 1..20: mol_type = other DNA
ccttgtgccgctgaaatcca

SEQ ID NO: 64 - DNA, 20 bp, synthetic construct
  source 1..20: mol_type = other DNA
ccttggatttcagcggcaca

SEQ ID NO: 65 - DNA, 20 bp, synthetic construct
  source 1..20: mol_type = other DNA
gcacaaggctcagctgaacc

SEQ ID NO: 66 - DNA, 20 bp, synthetic construct
  source 1..20: mol_type = other DNA
ctcagctgaacctggctacc

SEQ ID NO: 67 - DNA, 20 bp, synthetic construct
  source 1..20: mol_type = other DNA
tgaacctggctaccaggacc

SEQ ID NO: 68 - DNA, 20 bp, synthetic construct
  source 1..20: mol_type = other DNA
agaaaaaacaggagagtgca

SEQ ID NO: 69 - DNA, 20 bp, synthetic construct
  source 1..20: mol_type = other DNA
ttgtatgccaaacagactgg

SEQ ID NO: 70 - DNA, 20 bp, synthetic construct
  source 1..20: mol_type = other DNA
tgcatctgaaacccacacgt

SEQ ID NO: 71 - DNA, 20 bp, synthetic construct
  source 1..20: mol_type = other DNA
ctctgaagagctgaaaactg

SEQ ID NO: 72 - DNA, 20 bp, synthetic construct
  source 1..20: mol_type = other DNA
gaaaaaaatgaaggacatgg

SEQ ID NO: 73 - DNA, 20 bp, synthetic construct
  source 1..20: mol_type = other DNA
acatatttcatggtagagcc

SEQ ID NO: 74 - DNA, 47 bp, synthetic construct
  source 1..47: mol_type = other DNA
  modified_base 9: mod_base = OTHER; note = Uracil
aactatactacgtcaatcggctcttcacactactacagtgccaatag

SEQ ID NO: 75 - DNA, 48 bp, synthetic construct
  source 1..48: mol_type = other DNA
  modified_base 7: mod_base = OTHER; note = Uracil
tatagttacgtcaatcggctcttcacaccgtctgactaacataacctg

SEQ ID NO: 76 - DNA, 20 bp, synthetic construct
  source 1..20: mol_type = other DNA
acaccgctcccataaagcca

SEQ ID NO: 77 - DNA, 20 bp, synthetic construct
  source 1..20: mol_type = other DNA
gaccataggagagatgtggg

SEQ ID NO: 78 - DNA, 20 bp, synthetic construct
  source 1..20: mol_type = other DNA
tcgtcaggacaaagatgctc

SEQ ID NO: 79 - DNA, 20 bp, synthetic construct
  source 1..20: mol_type = other DNA
gagatgtggacagcatgttg

SEQ ID NO: 80 - DNA, 20 bp, synthetic construct
  source 1..20: mol_type = other DNA
tctctcagaatgacaattct

SEQ ID NO: 81 - DNA, 20 bp, synthetic construct
  source 1..20: mol_type = other DNA
ttccctataggatgtctcag

SEQ ID NO: 82 - DNA, 20 bp, synthetic construct
  source 1..20: mol_type = other DNA
cgcccggatgtgcactaaaa

SEQ ID NO: 83 - DNA, 20 bp, synthetic construct
  source 1..20: mol_type = other DNA
cacgcggggcatgaacctgg

SEQ ID NO: 84 - DNA, 20 bp, synthetic construct
  source 1..20: mol_type = other DNA
cacctgaggcgcctcggcca

SEQ ID NO: 85 - DNA, 20 bp, synthetic construct
  source 1..20: mol_type = other DNA
gagtcatgatgcaagaatct

SEQ ID NO: 86 - DNA, 20 bp, synthetic construct
  source 1..20: mol_type = other DNA
cagacgccaggacagagcag

SEQ ID NO: 87 - DNA, 20 bp, synthetic construct
  source 1..20: mol_type = other DNA
tttctggcaaacatgaagtc

SEQ ID NO: 88 - DNA, 20 bp, synthetic construct
  source 1..20: mol_type = other DNA
tggtaatgatggcttcaaca

SEQ ID NO: 89 - DNA, 20 bp, synthetic construct
  source 1..20: mol_type = other DNA
ggccacggagcgagacatct

SEQ ID NO: 90 - DNA, 20 bp, synthetic construct
  source 1..20: mol_type = other DNA
gggcatggtggctttgccaa

SEQ ID NO: 91 - DNA, 20 bp, synthetic construct
  source 1..20: mol_type = other DNA
accccacagagacatgatct

SEQ ID NO: 92 - DNA, 20 bp, synthetic construct
  source 1..20: mol_type = other DNA
aggccagaaaccatgcccat

SEQ ID NO: 93 - DNA, 20 bp, synthetic construct
  source 1..20: mol_type = other DNA
ccagagagcgtcatggacct

SEQ ID NO: 94 - DNA, 20 bp, synthetic construct
  source 1..20: mol_type = other DNA
gaaggaagcatgtgctccag

SEQ ID NO: 95 - DNA, 20 bp, synthetic construct
  source 1..20: mol_type = other DNA
tccaggcatgcagatcccac

SEQ ID NO: 96 - DNA, 20 bp, synthetic construct
  source 1..20: mol_type = other DNA
tcttttatagcatgtctcag

SEQ ID NO: 97 - DNA, 20 bp, synthetic construct
  source 1..20: mol_type = other DNA
cagagcccaaatggcgcagt

SEQ ID NO: 98 - DNA, 20 bp, synthetic construct
  source 1..20: mol_type = other DNA
aaagggaagatgtgaaaaca

SEQ ID NO: 99 - DNA, 20 bp, synthetic construct
  source 1..20: mol_type = other DNA
ctgcaaaagaggcaaaggaa

SEQ ID NO: 100 - DNA, 20 bp, synthetic construct
  source 1..20: mol_type = other DNA
caactcctgccacaatgtac

SEQ ID NO: 101 - DNA, 20 bp, synthetic construct
  source 1..20: mol_type = other DNA
ccctcagggaccatgggctg

SEQ ID NO: 102 - DNA, 20 bp, synthetic construct
  source 1..20: mol_type = other DNA
gccgagtacctggcatggag

SEQ ID NO: 103 - DNA, 20 bp, synthetic construct
  source 1..20: mol_type = other DNA
tcccattgggcccccactca

SEQ ID NO: 104 - DNA, 20 bp, synthetic construct
  source 1..20: mol_type = other DNA
atcagtccaatccagaaaat

SEQ ID NO: 105 - DNA, 20 bp, synthetic construct
  source 1..20: mol_type = other DNA
ccagggatgtggccgtgcca

SEQ ID NO: 106 - DNA, 113 bp, synthetic construct
  source 1..113: mol_type = other DNA
accctcctctcttctttctgcagtcgcttcctgcctcggatacccatacgatgtgcctgattacgcaggatcacggctcagctggtatgacccaggtaaggaagagccacatg

SEQ ID NO: 107 - DNA, 169 bp, synthetic construct
  source 1..169: mol_type = other DNA
aacaagcagcgcttcctgcctcggacggaccctcctctcttctttctgcagtcgcttcctgcctcggatacccatacgatgtgcctgattacgcaggatcacggctcagctggtatgacccaggtaaggaagagccacatgccgtccgaggcaggaagcgctgcttgtt

SEQ ID NO: 108 - DNA, 167 bp, synthetic construct
  source 1..167: mol_type = other DNA
ggtccgtccgaggcaggaagcgctgcaacaagcagcgcttcctgcctcggacggaccctcctctcttctttctgcagtcgcttcctgcctcggatacccatacgatgtgcctgattacgcaggatcacggctcagctggtatgacccaggtaaggaagagccacatg

SEQ ID NO: 109 - DNA, 167 bp, synthetic construct
  source 1..167: mol_type = other DNA
accctcctctcttctttctgcagtcgcttcctgcctcggatacccatacgatgtgcctgattacgcaggatcacggctcagctggtatgacccaggtaaggaagagccacatgccgtccgaggcaggaagcgctgcaacaagcagcgcttcctgcctcggacggatg

SEQ ID NO: 110 - DNA, 169 bp, synthetic construct
  source 1..169: mol_type = other DNA
aacaagcagcgcttcctgcctcggacggaccctcctctcttctttctgcagtcgcttcctgcctcggatacccatacgatgtgcctgattacgcaggatcacggctcagctggtatgacccaggtaaggaagagccacatgaacaagcagcgcttcctgcctcggacgg

SEQ ID NO: 111 - DNA, 169 bp, synthetic construct
  source 1..169: mol_type = other DNA
ccgtccgaggcaggaagcgctgcttgttaccctcctctcttctttctgcagtcgcttcctgcctcggatacccatacgatgtgcctgattacgcaggatcacggctcagctggtatgacccaggtaaggaagagccacatgccgtccgaggcaggaagcgctgcttgtt

SEQ ID NO: 112 - DNA, 181 bp, synthetic construct
  source 1..181: mol_type = other DNA
tttgaagctaccatggatgaaccctcctctcttctttctgcagtcgcttcctgcctcggatacccatacgatgtgcctgattacgcaggatcacggctcagctggtatgacccaggtaaggaagagccacatgtcatccatggtagcttcaaaccgtccgaggcaggaagcgctgcttgtt

SEQ ID NO: 113 - DNA, 181 bp, synthetic construct
  source 1..181: mol_type = other DNA
tttgaagctaccatggatgaaccctcctctcttctttctgcagtcgcttcctgcctcggatacccatacgatgtgcctgattacgcaggatcacggctcagctggtatgacccaggtaaggaagagccacatgtcatccatggtagcttcaaaaacaagcagcgcttcctgcctcggacgg

SEQ ID NO: 114 - DNA, 167 bp, synthetic construct
  source 1..167: mol_type = other DNA
ggtccgtccgaggcaggaagcgctgcaacaagcagcgcttcctgcctcggacggcatgtggctcttccttacctgggtcataccagctgagccgtgatcctgcgtaatcaggcacatcgtatgggtatccgaggcaggaagcgactgcagaaagaagagaggagggt

SEQ ID NO: 115 - DNA, 195 bp, synthetic construct
  source 1..195: mol_type = other DNA
aacaagcagcgcttcctgcctcggacggaccctcctctcttctttctgcagtcgcttcctgcctcggatacccatacgatgtgcctgattacgcaggatcacggctcagctggtatgacccaggtaaggaagagccacatgccgtccgaggcaggaagcgctgcaacaagcagcgcttcctgcctcggacggatg

SEQ ID NO: 116 - DNA, 38 bp, synthetic construct
  source 1..38: mol_type = other DNA
agaggagggtccgtccgaggcaggaagcgctgcttgtt

SEQ ID NO: 117 - DNA, 195 bp, synthetic construct
  source 1..195: mol_type = other DNA
ggtccgtccgaggcaggaagcgctgcaacaagcagcgcttcctgcctcggacggaccctcctctcttctttctgcagtcgcttcctgcctcggatacccatacgatgtgcctgattacgcaggatcacggctcagctggtatgacccaggtaaggaagagccacatgccgtccgaggcaggaagcgctgcttgtt

SEQ ID NO: 118 - DNA, 38 bp, synthetic construct
  source 1..38: mol_type = other DNA
aacaagcagcgcttcctgcctcggacggcatgtggctc

SEQ ID NO: 119 - DNA, 2652 bp, synthetic construct
  source 1..2652: mol_type = other DNA
ctccacctcccaggttcaagcaattctcctgcctcagcctccagaggagctgggattacaggcatgcatcaccacgccgagctaatttttgttatttttagtagagacagggtttcaccatattggctaggccagtctcaaactcctgacctcaagtgatccccccacctcggcctcccaaagtgcttggattataggcatgggccaccgtgcccggcccctttctggatcatttctccattctctagaactaaggagctcaaacttttttgagtggaaacatgcgggacatttttacattgcaacccccaacacacaaaaagtgatcagtgcattctgacattctcttttttatttatttaaaacaaaacaaacaaaaaaaaacagggtcttactctgtcacccagctagagtgctgtggcataatcatagctcactgcagggtccaacttctgggctcaagcggtcctcccaccttggcccccttaagtgctgggattgcagtcataagccaccgtgcacggcctctctattctactccatttcatttttaaaaaaattgatggcctgagtgctgtggctcacacatgtgaatcccagcacttcaggaagctgatgcacgaggatcacttgagcccaggagttcaaaaccagcctggacaacatagtgagaccccatctctacatacacacacacatacatgcatacatacatacatacacacatacatagtaaaaaaattagccaggcatagtggctcatgcctgtaatcctagctactcaagaggctgaggtgggaggattctttgagccagggaggttgaggctgcagtgagctgtgatcatgccactgcactccagcctgggtgaggagagtgatatcctgtctcaaaaagtaataataataataattgatggttacattattacaaaggttagcatgagggaatttgaggtagggagtaatggaactggtgtataccttgattgtgatggtggtcacacacatctatatatgtgacattcacggaatcatgcagtaaagaaaaatcaatttcacgtctgttcattttaaaagtaacgttttttaagaagaaaaaaaatcgatagttgcagcccactagatagaattcatatcactcaggggttccaacctggagtatgaaaattcctgtccctaaaacccatgatagtggatagggggaggcagaaagggccattgctcgggctgtgggtgggtgagctggggagaagggagagagtgggaggtttcacttcctgaccctcctctcttctttctgcagtcgcttcctgcctcggatacccatacgatgtgcctgattacgcaggatcacggctcagctggtatgacccaggtaaggaagagccacatggagaaaggcctggggcagggggagagtggggctgtggtttcatcaggccatcggggacctctcgatgaagccatcacttctgccagagtgaaccccaccctatagagagagtgaaccccagcatacacacaggcacatagatgcagacactgcacattaagatgctcacatgcaggtgggtgccctcgacagccgtaaatcacccacaaatgccagatctcatgataattattatgacccgctcaccatgcacagaagacatcccagctcataaatgtaccttgcaaagtcttatttcccacccaatcctgacagatgctccatggtcaaagatgtttagagcggagtctgcagagagaggccgcagactgatggtaaagtgtgtggaacgtccagccttagacgttggagtttagtcgtagaggctgtttcccaaatagggttccatggagcatgttggacaaagggcaggcaacaccgcatctcccactgaagactgacagtgtacaccggcccagtaaaggatctgagaaatcctgcagcgaagaaatacatgacactttttaacccagcactttgcacccttatttcaccacagacctctccttcacattgactgggataacatcgtgctgaatgtacctggggagaattgtggctgaagggtcttgagatgccactgtgcagccagagggggtgacaggggccttggcaggccctaagcacgatctgggccctgcactgacatcctagctccaagctttggcacactgcttgacctcttgagcccgtttccccagctgtgaaatgggaagaaaatctcttgcctggtgaagcggcaacgagccagctcgctgggcggacagcctgcaaatcaccccaccaatgttaggtgttgagacgcgctcgttctccctctaaccagccaagtgcccttggcgagccctggccctgagctttggccccagagtgtcctcgtcggaagaaaagggtagcctgacccgtggttcccgaccagggaaaacctccccctcagaatcacctgggagagcctttcacatttctaaaaatttcttgaatcagtgacacattcatccagctcaaaaatttaaaaaaatataaaaagatctgtagtgaagagtctcacttccatctctattcccgtctatcccagtcgcccccgacgtcgaccccaacaccccaggtaatgactacgtttatttgtttcttgcatattcttcaaggagctctttatgc

SEQ ID NO: 120 - DNA, 2698 bp, synthetic construct
  source 1..2698: mol_type = other DNA
gcagcgcttcctgcctcggacggctccacctcccaggttcaagcaattctcctgcctcagcctccagaggagctgggattacaggcatgcatcaccacgccgagctaatttttgttatttttagtagagacagggtttcaccatattggctaggccagtctcaaactcctgacctcaagtgatccccccacctcggcctcccaaagtgcttggattataggcatgggccaccgtgcccggcccctttctggatcatttctccattctctagaactaaggagctcaaacttttttgagtggaaacatgcgggacatttttacattgcaacccccaacacacaaaaagtgatcagtgcattctgacattctcttttttatttatttaaaacaaaacaaacaaaaaaaaacagggtcttactctgtcacccagctagagtgctgtggcataatcatagctcactgcagggtccaacttctgggctcaagcggtcctcccaccttggcccccttaagtgctgggattgcagtcataagccaccgtgcacggcctctctattctactccatttcatttttaaaaaaattgatggcctgagtgctgtggctcacacatgtgaatcccagcacttcaggaagctgatgcacgaggatcacttgagcccaggagttcaaaaccagcctggacaacatagtgagaccccatctctacatacacacacacatacatgcatacatacatacatacacacatacatagtaaaaaaattagccaggcatagtggctcatgcctgtaatcctagctactcaagaggctgaggtgggaggattctttgagccagggaggttgaggctgcagtgagctgtgatcatgccactgcactccagcctgggtgaggagagtgatatcctgtctcaaaaagtaataataataataattgatggttacattattacaaaggttagcatgagggaatttgaggtagggagtaatggaactggtgtataccttgattgtgatggtggtcacacacatctatatatgtgacattcacggaatcatgcagtaaagaaaaatcaatttcacgtctgttcattttaaaagtaacgttttttaagaagaaaaaaaatcgatagttgcagcccactagatagaattcatatcactcaggggttccaacctggagtatgaaaattcctgtccctaaaacccatgatagtggatagggggaggcagaaagggccattgctcgggctgtgggtgggtgagctggggagaagggagagagtgggaggtttcacttcctgaccctcctctcttctttctgcagtcgcttcctgcctcggatacccatacgatgtgcctgattacgcaggatcacggctcagctggtatgacccaggtaaggaagagccacatggagaaaggcctggggcagggggagagtggggctgtggtttcatcaggccatcggggacctctcgatgaagccatcacttctgccagagtgaaccccaccctatagagagagtgaaccccagcatacacacaggcacatagatgcagacactgcacattaagatgctcacatgcaggtgggtgccctcgacagccgtaaatcacccacaaatgccagatctcatgataattattatgacccgctcaccatgcacagaagacatcccagctcataaatgtaccttgcaaagtcttatttcccacccaatcctgacagatgctccatggtcaaagatgtttagagcggagtctgcagagagaggccgcagactgatggtaaagtgtgtggaacgtccagccttagacgttggagtttagtcgtagaggctgtttcccaaatagggttccatggagcatgttggacaaagggcaggcaacaccgcatctcccactgaagactgacagtgtacaccggcccagtaaaggatctgagaaatcctgcagcgaagaaatacatgacactttttaacccagcactttgcacccttatttcaccacagacctctccttcacattgactgggataacatcgtgctgaatgtacctggggagaattgtggctgaagggtcttgagatgccactgtgcagccagagggggtgacaggggccttggcaggccctaagcacgatctgggccctgcactgacatcctagctccaagctttggcacactgcttgacctcttgagcccgtttccccagctgtgaaatgggaagaaaatctcttgcctggtgaagcggcaacgagccagctcgctgggcggacagcctgcaaatcaccccaccaatgttaggtgttgagacgcgctcgttctccctctaaccagccaagtgcccttggcgagccctggccctgagctttggccccagagtgtcctcgtcggaagaaaagggtagcctgacccgtggttcccgaccagggaaaacctccccctcagaatcacctgggagagcctttcacatttctaaaaatttcttgaatcagtgacacattcatccagctcaaaaatttaaaaaaatataaaaagatctgtagtgaagagtctcacttccatctctattcccgtctatcccagtcgcccccgacgtcgaccccaacaccccaggtaatgactacgtttatttgtttcttgcatattcttcaaggagctctttatgcccgtccgaggcaggaagcgctgc

SEQ ID NO: 121 - DNA, 43 bp, synthetic construct
  source 1..43: mol_type = other DNA
cttgaacctgggaggtggagccgtccgaggcaggaagcgctgc

SEQ ID NO: 122 - DNA, 43 bp, synthetic construct
  source 1..43: mol_type = other DNA
gcagcgcttcctgcctcggacgggcataaagagctccttgaag

SEQ ID NO: 123 - DNA, 1373 bp, synthetic construct
  source 1..1373: mol_type = other DNA
gagatgagagaagagagtgctaggcagtttcctggctgaacacgccagcccaatacttaaagagagcaactcctgactccgatagagactggatggacccacaagggtgacagcccaggcggaccgatcttcccatcccacatcctccggcgcgatgccaaaaagaggctgacggcaactgggccttctgcagagaaagacctccgcttcactgccccggctggtcccaagggtcaggaagatgagcaagggcgaggagctgttcaccggggtggtgcccatcctggtcgagctggacggcgacgtaaacggccacaagttcagcgtgcgcggcgagggcgagggcgatgccaccaacggcaagctgaccctgaagttcatctgcaccaccggcaagctgcccgtgccctggcccaccctcgtgaccaccctgacctacggcgtgcagtgcttcagccgctaccccgaccacatgaagcgccacgacttcttcaagtccgccatgcccgaaggctacgtccaggagcgcaccatcagcttcaaggacgacggcacctacaagacccgcgccgaggtgaagttcgagggcgacaccctggtgaaccgcatcgagctgaagggcatcgacttcaaggaggacggcaacatcctggggcacaagctggagtacaacttcaacagccacaacgtctatatcaccgccgacaagcagaagaacggcatcaaggccaacttcaagatccgccacaacgtggaggacggcagcgtgcagctcgccgaccactaccagcagaacacccccatcggcgacggccccgtgctgctgcccgacaaccactacctgagcacccagtccgtgctgagcaaagaccccaacgagaagcgcgatcacatggtcctgctggagttcgtgaccgccgccgggatcactggatctggagcaacaaacttctcactactcaaacaagcaggtgacgtggaggagaatcccggccccatggacagctatttgctcatgtggggactgctcacgttcatcatggtgcctggctgccaggcaggtaagggcctgtgggtgcccccggaattccgggaaggctgatgggcatccctcttcccagccacagaaccagagggagtccccaggtagatggttccaagaagggagttgaatcttgggttccacctcttgcctgtgacccacggggaccccagtttatgcctcactgttccttggtctgtcaagagagcctgaaatagcattaggttctcctgtccttctcagtccttgacaattaattctgggaagaatagtgtggcatgatatttgggatatttggatgttaacagggtcccgatgagcaggtttctca

SEQ ID NO: 124 - DNA, 1419 bp, synthetic construct
  source 1..1419: mol_type = other DNA
actccagtccccacatcagccgggagatgagagaagagagtgctaggcagtttcctggctgaacacgccagcccaatacttaaagagagcaactcctgactccgatagagactggatggacccacaagggtgacagcccaggcggaccgatcttcccatcccacatcctccggcgcgatgccaaaaagaggctgacggcaactgggccttctgcagagaaagacctccgcttcactgccccggctggtcccaagggtcaggaagatgagcaagggcgaggagctgttcaccggggtggtgcccatcctggtcgagctggacggcgacgtaaacggccacaagttcagcgtgcgcggcgagggcgagggcgatgccaccaacggcaagctgaccctgaagttcatctgcaccaccggcaagctgcccgtgccctggcccaccctcgtgaccaccctgacctacggcgtgcagtgcttcagccgctaccccgaccacatgaagcgccacgacttcttcaagtccgccatgcccgaaggctacgtccaggagcgcaccatcagcttcaaggacgacggcacctacaagacccgcgccgaggtgaagttcgagggcgacaccctggtgaaccgcatcgagctgaagggcatcgacttcaaggaggacggcaacatcctggggcacaagctggagtacaacttcaacagccacaacgtctatatcaccgccgacaagcagaagaacggcatcaaggccaacttcaagatccgccacaacgtggaggacggcagcgtgcagctcgccgaccactaccagcagaacacccccatcggcgacggccccgtgctgctgcccgacaaccactacctgagcacccagtccgtgctgagcaaagaccccaacgagaagcgcgatcacatggtcctgctggagttcgtgaccgccgccgggatcactggatctggagcaacaaacttctcactactcaaacaagcaggtgacgtggaggagaatcccggccccatggacagctatttgctcatgtggggactgctcacgttcatcatggtgcctggctgccaggcaggtaagggcctgtgggtgcccccggaattccgggaaggctgatgggcatccctcttcccagccacagaaccagagggagtccccaggtagatggttccaagaagggagttgaatcttgggttccacctcttgcctgtgacccacggggaccccagtttatgcctcactgttccttggtctgtcaagagagcctgaaatagcattaggttctcctgtccttctcagtccttgacaattaattctgggaagaatagtgtggcatgatatttgggatatttggatgttaacagggtcccgatgagcaggtttctcaccggctgatgtggggactggagt

SEQ ID NO: 125 - DNA, 43 bp, synthetic construct
  source 1..43: mol_type = other DNA
gcactctcttctctcatctcccggctgatgtggggactggagt

SEQ ID NO: 126 - DNA, 42 bp, synthetic construct
  source 1..42: mol_type = other DNA
actccagtccccacatcagccggtgagaaacctgctcatcgg

SEQ ID NO: 127 - DNA, 2172 bp, synthetic construct
  source 1..2172: mol_type = other DNA
taggcagtttcctggctgaacacgccagcccaatacttaaagagagcaactcctgactccgatagagactggatggacccacaagggtgacagcccaggcggaccgatcttcccatcccacatcctccggcgcgatgccaaaaagaggctgacggcaactgggccttctgcagagaaagacctccgcttcactgccccggctggtcccaagggtcaggaagatggattcatatttgctcatgtggggcctcctgacctttattatggtccctggctgtcaagcagagctctgtgacgatgacccgccagagatcccacacgccacattcaaagccatggcctacaaggaaggaaccatgttgaactgtgaatgcaagagaggtttccgcagaataaaaagcgggtcactctatatgctctgtacaggaaactctagccactcgtcctgggacaaccaatgtcaatgcacaagctctgccactcggaacacaacgaaacaagtgacacctcaacctgaagaacagaaagaaaggaaaaccacagaaatgcaaagtccaatgcagccagtggaccaagcgagccttccaggtcactgcagggaacctccaccatgggaaaatgaagccacagagagaatttatcatttcgtggtggggcagatggtttattatcagtgcgtccagggatacagggctctacacagaggtcctgctgagagcgtctgcaaaatgacccacgggaagacaaggtggacccagccccagctcatatgcacaggtgaaatggagaccagtcagtttccaggtgaagagaagcctcaggcaagccccgaaggccgtcctgagagtgagacttcctgcctcgtcacaacaacagattttcaaatacagacagaaatggctgcaaccatggagacgtccatatttacaacagagtaccaggtagcagtggccggctgtgttttcctgctgatcagcgtcctcctcctgagtgggctcacctggcagcggagacagaggaagagtagaagaacaatcggatcgggtgggactagtggcagcaagggcgaggagctgttcaccggggtggtgcccatcctggtcgagctggacggcgacgtaaacggccacaagttcagcgtgcgcggcgagggcgagggcgatgccaccaacggcaagctgaccctgaagttcatctgcaccaccggcaagctgcccgtgccctggcccaccctcgtgaccaccctgacctacggcgtgcagtgcttcagccgctaccccgaccacatgaagcgccacgacttcttcaagtccgccatgcccgaaggctacgtccaggagcgcaccatcagcttcaaggacgacggcacctacaagacccgcgccgaggtgaagttcgagggcgacaccctggtgaaccgcatcgagctgaagggcatcgacttcaaggaggacggcaacatcctggggcacaagctggagtacaacttcaacagccacaacgtctatatcaccgccgacaagcagaagaacggcatcaaggccaacttcaagatccgccacaacgtggaggacggcagcgtgcagctcgccgaccactaccagcagaacacccccatcggcgacggccccgtgctgctgcccgacaaccactacctgagcacccagtccgtgctgagcaaagaccccaacgagaagcgcgatcacatggtcctgctggagttcgtgaccgccgccgggatcacttagaacttgtttattgcagcttataatggttacaaataaagcaatagcatcacaaatttcacaaataaagcatttttttcactgcattctagttgtggtttgtccaaactcatcaatgtatcttatcatgtctggtaagggcctgtgggtgcccccggaattccgggaaggctgatgggcatccctcttcccagccacagaaccagagggagtccccaggtagatggttccaagaagggagttgaatcttgggttccacctcttgcctgtgacccacggggaccccagtttatgcctcactgttccttggtctgtcaagagagcctgaaatagcattaggttctcctgtccttctcagtccttgacaattaattctgggaagaatagtgtggcatgatatttgggatatttggatgttaacagggtc

SEQ ID NO: 128 - DNA, 2257 bp, synthetic construct
  source 1..2257: mol_type = other DNA
actccagtccccacatcagccgggagatgagagaagagagtgctaggcagtttcctggctgaacacgccagcccaatacttaaagagagcaactcctgactccgatagagactggatggacccacaagggtgacagcccaggcggaccgatcttcccatcccacatcctccggcgcgatgccaaaaagaggctgacggcaactgggccttctgcagagaaagacctccgcttcactgccccggctggtcccaagggtcaggaagatggattcatatttgctcatgtggggcctcctgacctttattatggtccctggctgtcaagcagagctctgtgacgatgacccgccagagatcccacacgccacattcaaagccatggcctacaaggaaggaaccatgttgaactgtgaatgcaagagaggtttccgcagaataaaaagcgggtcactctatatgctctgtacaggaaactctagccactcgtcctgggacaaccaatgtcaatgcacaagctctgccactcggaacacaacgaaacaagtgacacctcaacctgaagaacagaaagaaaggaaaaccacagaaatgcaaagtccaatgcagccagtggaccaagcgagccttccaggtcactgcagggaacctccaccatgggaaaatgaagccacagagagaatttatcatttcgtggtggggcagatggtttattatcagtgcgtccagggatacagggctctacacagaggtcctgctgagagcgtctgcaaaatgacccacgggaagacaaggtggacccagccccagctcatatgcacaggtgaaatggagaccagtcagtttccaggtgaagagaagcctcaggcaagccccgaaggccgtcctgagagtgagacttcctgcctcgtcacaacaacagattttcaaatacagacagaaatggctgcaaccatggagacgtccatatttacaacagagtaccaggtagcagtggccggctgtgttttcctgctgatcagcgtcctcctcctgagtgggctcacctggcagcggagacagaggaagagtagaagaacaatcggatcgggtgggactagtggcagcaagggcgaggagctgttcaccggggtggtgcccatcctggtcgagctggacggcgacgtaaacggccacaagttcagcgtgcgcggcgagggcgagggcgatgccaccaacggcaagctgaccctgaagttcatctgcaccaccggcaagctgcccgtgccctggcccaccctcgtgaccaccctgacctacggcgtgcagtgcttcagccgctaccccgaccacatgaagcgccacgacttcttcaagtccgccatgcccgaaggctacgtccaggagcgcaccatcagcttcaaggacgacggcacctacaagacccgcgccgaggtgaagttcgagggcgacaccctggtgaaccgcatcgagctgaagggcatcgacttcaaggaggacggcaacatcctggggcacaagctggagtacaacttcaacagccacaacgtctatatcaccgccgacaagcagaagaacggcatcaaggccaacttcaagatccgccacaacgtggaggacggcagcgtgcagctcgccgaccactaccagcagaacacccccatcggcgacggccccgtgctgctgcccgacaaccactacctgagcacccagtccgtgctgagcaaagaccccaacgagaagcgcgatcacatggtcctgctggagttcgtgaccgccgccgggatcacttagaacttgtttattgcagcttataatggttacaaataaagcaatagcatcacaaatttcacaaataaagcatttttttcactgcattctagttgtggtttgtccaaactcatcaatgtatcttatcatgtctggtaagggcctgtgggtgcccccggaattccgggaaggctgatgggcatccctcttcccagccacagaaccagagggagtccccaggtagatggttccaagaagggagttgaatcttgggttccacctcttgcctgtgacccacggggaccccagtttatgcctcactgttccttggtctgtcaagagagcctgaaatagcattaggttctcctgtccttctcagtccttgacaattaattctgggaagaatagtgtggcatgatatttgggatatttggatgttaacagggtcccgatgagcaggtttctcaccggctgatgtggggactggagt

SEQ ID NO: 129 - DNA, 3391 bp, synthetic construct
  source 1..3391: mol_type = other DNA
taggcagtttcctggctgaacacgccagcccaatacttaaagagagcaactcctgactccgatagagactggatggacccacaagggtgacagcccaggcggaccgatcttcccatcccacatcctccggcgcgatgccaaaaagaggctgacggcaactgggccttctgcagagaaagacctccgcttcactgccccggctggtcccaagggtcaggaagatggattcatatttgctcatgtggggcctcctgacctttattatggtccctggctgtcaagcagagctctgtgacgatgacccgccagagatcccacacgccacattcaaagccatggcctacaaggaaggaaccatgttgaactgtgaatgcaagagaggtttccgcagaataaaaagcgggtcactctatatgctctgtacaggaaactctagccactcgtcctgggacaaccaatgtcaatgcacaagctctgccactcggaacacaacgaaacaagtgacacctcaacctgaagaacagaaagaaaggaaaaccacagaaatgcaaagtccaatgcagccagtggaccaagcgagccttccaggtcactgcagggaacctccaccatgggaaaatgaagccacagagagaatttatcatttcgtggtggggcagatggtttattatcagtgcgtccagggatacagggctctacacagaggtcctgctgagagcgtctgcaaaatgacccacgggaagacaaggtggacccagccccagctcatatgcacaggtgaaatggagaccagtcagtttccaggtgaagagaagcctcaggcaagccccgaaggccgtcctgagagtgagacttcctgcctcgtcacaacaacagattttcaaatacagacagaaatggctgcaaccatggagacgtccatatttacaacagagtaccaggtagcagtggccggctgtgttttcctgctgatcagcgtcctcctcctgagtgggctcacctggcagcggagacagaggaagagtagaagaacaatcggatcgggtgggactagtggcagcaagggcgaggagctgttcaccggggtggtgcccatcctggtcgagctggacggcgacgtaaacggccacaagttcagcgtgcgcggcgagggcgagggcgatgccaccaacggcaagctgaccctgaagttcatctgcaccaccggcaagctgcccgtgccctggcccaccctcgtgaccaccctgacctacggcgtgcagtgcttcagccgctaccccgaccacatgaagcgccacgacttcttcaagtccgccatgcccgaaggctacgtccaggagcgcaccatcagcttcaaggacgacggcacctacaagacccgcgccgaggtgaagttcgagggcgacaccctggtgaaccgcatcgagctgaagggcatcgacttcaaggaggacggcaacatcctggggcacaagctggagtacaacttcaacagccacaacgtctatatcaccgccgacaagcagaagaacggcatcaaggccaacttcaagatccgccacaacgtggaggacggcagcgtgcagctcgccgaccactaccagcagaacacccccatcggcgacggccccgtgctgctgcccgacaaccactacctgagcacccagtccgtgctgagcaaagaccccaacgagaagcgcgatcacatggtcctgctggagttcgtgaccgccgccgggatcacttagaacttgtttattgcagcttataatggttacaaataaagcaatagcatcacaaatttcacaaataaagcatttttttcactgcattctagttgtggtttgtccaaactcatcaatgtatcttatcatgtctgatctgtaagacaagaggatccctcgagtatccagaaccctgacccgggcagagcgcacatcgcccacagtccccgagaagttggggggaggggtcggcaattgatccggtgcctagagaaggtggcgcggggtaaactgggaaagtgatgtcgtgtactggctccgcctttttcccgagggtgggggagaaccgtatataagtgcagtagtcgccgtgaacgttctttttcgcaacgggtttgccgccagaacacaggcaattccacaacagccgccatggtgagcaagggcgaggaggataacatggccatcatcaaggagttcatgcgcttcaaggtgcacatggagggctccgtgaacggccacgagttcgagatcgagggcgagggcgagggccgcccctacgagggcacccagaccgccaagctgaaggtgaccaagggtggccccctgcccttcgcctgggacatcctgtcccctcagttcatgtacggctccaaggcctacgtgaagcaccccgccgacatccccgactacttgaagctgtccttccccgagggcttcaagtgggagcgcgtgatgaacttcgaggacggcggcgtggtgaccgtgacccaggactcctccctgcaggacggcgagttcatctacaaggtgaagctgcgcggcaccaacttcccctccgacggccccgtaatgcagaagaagaccatgggctgggaggcctcctccgagcggatgtaccccgaggacggcgccctgaagggcgagatcaagcagaggctgaagctgaaggacggcggccactacgacgctgaggtcaagaccacctacaaggccaagaagcccgtgcagctgcccggcgcctacaacgtcaacatcaagttggacatcacctcccacaacgaggactacaccatcgtggaacagtacgaacgcgccgagggccgccactccaccggcggcatggacgagctgtacaagtaatgatgactgtgccttctagttgccagccatctgttgtttgcccctcccccgtgccttccttgaccctggaaggtgccactcccactgtcctttcctaataaaatgaggaaattgcatcgcattgtctgagtaggtgtcattctattctggggggtggggtggggcaggacagcaagggggaggattgggaagacaatagcaggcatgctggggatgcggtgggctctatgggtaagggcctgtgggtgcccccggaattccgggaaggctgatgggcatccctcttcccagccacagaaccagagggagtccccaggtagatggttccaagaagggagttgaatcttgggttccacctcttgcctgtgacccacggggaccccagtttatgcctcactgttccttggtctgtcaagagagcctgaaatagcattaggttctcctgtccttctcagtccttgacaattaattctgggaagaatagtgtggcatgatatttgggatatttggatgttaacagggtc

SEQ ID NO: 130 - DNA, 3476 bp, synthetic construct
  source 1..3476: mol_type = other DNA
actccagtccccacatcagccgggagatgagagaagagagtgctaggcagtttcctggctgaacacgccagcccaatacttaaagagagcaactcctgactccgatagagactggatggacccacaagggtgacagcccaggcggaccgatcttcccatcccacatcctccggcgcgatgccaaaaagaggctgacggcaactgggccttctgcagagaaagacctccgcttcactgccccggctggtcccaagggtcaggaagatggattcatatttgctcatgtggggcctcctgacctttattatggtccctggctgtcaagcagagctctgtgacgatgacccgccagagatcccacacgccacattcaaagccatggcctacaaggaaggaaccatgttgaactgtgaatgcaagagaggtttccgcagaataaaaagcgggtcactctatatgctctgtacaggaaactctagccactcgtcctgggacaaccaatgtcaatgcacaagctctgccactcggaacacaacgaaacaagtgacacctcaacctgaagaacagaaagaaaggaaaaccacagaaatgcaaagtccaatgcagccagtggaccaagcgagccttccaggtcactgcagggaacctccaccatgggaaaatgaagccacagagagaatttatcatttcgtggtggggcagatggtttattatcagtgcgtccagggatacagggctctacacagaggtcctgctgagagcgtctgcaaaatgacccacgggaagacaaggtggacccagccccagctcatatgcacaggtgaaatggagaccagtcagtttccaggtgaagagaagcctcaggcaagccccgaaggccgtcctgagagtgagacttcctgcctcgtcacaacaacagattttcaaatacagacagaaatggctgcaaccatggagacgtccatatttacaacagagtaccaggtagcagtggccggctgtgttttcctgctgatcagcgtcctcctcctgagtgggctcacctggcagcggagacagaggaagagtagaagaacaatcggatcgggtgggactagtggcagcaagggcgaggagctgttcaccggggtggtgcccatcctggtcgagctggacggcgacgtaaacggccacaagttcagcgtgcgcggcgagggcgagggcgatgccaccaacggcaagctgaccctgaagttcatctgcaccaccggcaagctgcccgtgccctggcccaccctcgtgaccaccctgacctacggcgtgcagtgcttcagccgctaccccgaccacatgaagcgccacgacttcttcaagtccgccatgcccgaaggctacgtccaggagcgcaccatcagcttcaaggacgacggcacctacaagacccgcgccgaggtgaagttcgagggcgacaccctggtgaaccgcatcgagctgaagggcatcgacttcaaggaggacggcaacatcctggggcacaagctggagtacaacttcaacagccacaacgtctatatcaccgccgacaagcagaagaacggcatcaaggccaacttcaagatccgccacaacgtggaggacggcagcgtgcagctcgccgaccactaccagcagaacacccccatcggcgacggccccgtgctgctgcccgacaaccactacctgagcacccagtccgtgctgagcaaagaccccaacgagaagcgcgatcacatggtcctgctggagttcgtgaccgccgccgggatcacttagaacttgtttattgcagcttataatggttacaaataaagcaatagcatcacaaatttcacaaataaagcatttttttcactgcattctagttgtggtttgtccaaactcatcaatgtatcttatcatgtctgatctgtaagacaagaggatccctcgagtatccagaaccctgacccgggcagagcgcacatcgcccacagtccccgagaagttggggggaggggtcggcaattgatccggtgcctagagaaggtggcgcggggtaaactgggaaagtgatgtcgtgtactggctccgcctttttcccgagggtgggggagaaccgtatataagtgcagtagtcgccgtgaacgttctttttcgcaacgggtttgccgccagaacacaggcaattccacaacagccgccatggtgagcaagggcgaggaggataacatggccatcatcaaggagttcatgcgcttcaaggtgcacatggagggctccgtgaacggccacgagttcgagatcgagggcgagggcgagggccgcccctacgagggcacccagaccgccaagctgaaggtgaccaagggtggccccctgcccttcgcctgggacatcctgtcccctcagttcatgtacggctccaaggcctacgtgaagcaccccgccgacatccccgactacttgaagctgtccttccccgagggcttcaagtgggagcgcgtgatgaacttcgaggacggcggcgtggtgaccgtgacccaggactcctccctgcaggacggcgagttcatctacaaggtgaagctgcgcggcaccaacttcccctccgacggccccgtaatgcagaagaagaccatgggctgggaggcctcctccgagcggatgtaccccgaggacggcgccctgaagggcgagatcaagcagaggctgaagctgaaggacggcggccactacgacgctgaggtcaagaccacctacaaggccaagaagcccgtgcagctgcccggcgcctacaacgtcaacatcaagttggacatcacctcccacaacgaggactacaccatcgtggaacagtacgaacgcgccgagggccgccactccaccggcggcatggacgagctgtacaagtaatgatgactgtgccttctagttgccagccatctgttgtttgcccctcccccgtgccttccttgaccctggaaggtgccactcccactgtcctttcctaataaaatgaggaaattgcatcgcattgtctgagtaggtgtcattctattctggggggtggggtggggcaggacagcaagggggaggattgggaagacaatagcaggcatgctggggatgcggtgggctctatgggtaagggcctgtgggtgcccccggaattccgggaaggctgatgggcatccctcttcccagccacagaaccagagggagtccccaggtagatggttccaagaagggagttgaatcttgggttccacctcttgcctgtgacccacggggaccccagtttatgcctcactgttccttggtctgtcaagagagcctgaaatagcattaggttctcctgtccttctcagtccttgacaattaattctgggaagaatagtgtggcatgatatttgggatatttggatgttaacagggtcccgatgagcaggtttctcaccggctgatgtggggactggagt

SEQ ID NO: 131 - DNA, 2867 bp, synthetic construct
  source 1..2867: mol_type = other DNA
agctgctgtgacttgctcaaggccttatatcgagtaaacggtagtgctggggcttagacgcaggtgttctgatttatagttcaaaacctctatcaatgagagagcaatctcctggtaatgtgatagatttcccaacttaatgccaacataccataaacctcccattctgctaatgcccagcctaagttggggagaccactccagattccaagatgtacagtttgctttgctgggcctttttcccatgcctgcctttactctgccagagttatattgctggggttttgaagaagatcctattaaataaaagaataagcagtattattaagtagccctgcatttcaggtttccttgagtggcaggccaggcctggccgtgaacgttcactgaaatcatggcctcttggccaagattgatagcttgtgcctgtccctgagtcccagtccatcacgagcagctggtttctaagatgctatttcccgtataaagcatgagaccgtgacttgccagccccacagagccccgcccttgtccatcactggcatctggactccagcctgggttggggcaaagagggaaatgagatcatgtcctaaccctggaattggatcctcttgtcttacagatggatctggagcaacaaacttctcactactcaaacaagcaggtgacgtggaggagaatcccggccccatggcacttccagtaactgcgctgctgctcccgctcgcactcctgctgcatgcggcccgaccagaacagaagcttatctctgaagaggatcttcaggtccaactcgttcagtccggcgcggaagtaaaaaaacctggagcgtcagttaaagtatcctgtaaggcgagtggatattcatttcccgattattacattaattgggtgcgacaagcgcctggtcagggtcttgaatggatgggatggatatacttcgcgtctgggaatagtgaatacaatcagaaatttaccggcagggtgacgatgacgcgagacacctccattaatactgcctatatggaactcagctctctcacttcagaggacacagccgtctacttctgtgcctccctttatgattacgattggtattttgacgtgtggggtcaaggaactatggttactgtgtctagcgggggaggtggctcaggtgggggaggttcaggaggaggcgggtccgacatcgtgatgacacaaacccctctgagcctgagcgttacgccagggcaaccagcctccatttcatgcaagtccagccagtcactcgtgcattcaaatggaaacacctatctgcactggtatcttcaaaaaccaggtcagtcaccccagttgttgatatacaaagttagtaatcgcttctccggagtacccgatcggttcagcgggtctggttcagggacggatttcaccttgaaaattagccgagttgaggctgaagatgtgggaatttactattgcagtcagagcagcatttacccctggacgttcgggcagggcaccaagttggaaattaaggcggccgcaattgaagttatgtatcctcctccttacctagacaatgagaagagcaatggaaccattatccatgtgaaagggaaacacctttgtccaagtcccctatttcccggaccttctaagcccttttgggtgctggtggtggttggtggagtcctggcttgctatagcttgctagtaacagtggcctttattattttctgggtgaggagtaagaggagcaggctcctgcacagtgactacatgaacatgactccccgccgccccgggcccacccgcaagcattaccagccctatgccccaccacgcgacttcgcagcctatcgctccagagtgaagttcagcaggagcgcagacgcccccgcgtaccagcagggccagaaccagctctataacgagctcaatctaggacgaagagaggagtacgatgttttggacaagagacgtggccgggaccctgagatggggggaaagccgagaaggaagaaccctcaggaaggcctgtacaatgaactgcagaaagataagatggcggaggcctacagtgagattgggatgaaaggcgagcgccggaggggcaaggggcacgatggcctttaccagggtctcagtacagccaccaaggacacctacgacgcccttcacatgcaggccctgccccctcgcggaagcggagctactaacttcagcctgctgaagcaggctggagacgtggaggagaaccctggacccaatatccagaaccctgaccctgccgtgtaccagctgagagactctaaatccagtgacaagtctgtctgcctattcaccgattttgattctcaaacaaatgtgtcacaaagtaaggattctgatgtgtatatcacagacaaaactgtgctagacatgaggtctatggacttcaagagcaacagtgctgtggcctggagcaacaaatctgactttgcatgtgcaaacgccttcaacaacagcattattccagaagacaccttcttccccagcccaggtaagggcagctttggtgccttcgcaggctgtttccttgcttcaggaatggccaggttctgcccagagctctggtcaatgatgtctaaaactcctctgattggtggtctcggccttatccattgccaccaaaaccctctttttactaagaaacagtgagccttgttctggcagtccagagaatgacacgggaaaaaagcagatgaagagaaggtggcaggagagggcacgtggcccagcctcagtctctccaactgagttcctgcctgcctgcctttgctcagactgtttgccccttactgctcttctaggcctcattctaagccccttctccaagt

SEQ ID NO: 132 - DNA, 2923 bp, synthetic construct
  source 1..2923: mol_type = other DNA
tggcgagtcggttctggatatctgtcggagctgctgtgacttgctcaaggccttatatcgagtaaacggtagtgctggggcttagacgcaggtgttctgatttatagttcaaaacctctatcaatgagagagcaatctcctggtaatgtgatagatttcccaacttaatgccaacataccataaacctcccattctgctaatgcccagcctaagttggggagaccactccagattccaagatgtacagtttgctttgctgggcctttttcccatgcctgcctttactctgccagagttatattgctggggttttgaagaagatcctattaaataaaagaataagcagtattattaagtagccctgcatttcaggtttccttgagtggcaggccaggcctggccgtgaacgttcactgaaatcatggcctcttggccaagattgatagcttgtgcctgtccctgagtcccagtccatcacgagcagctggtttctaagatgctatttcccgtataaagcatgagaccgtgacttgccagccccacagagccccgcccttgtccatcactggcatctggactccagcctgggttggggcaaagagggaaatgagatcatgtcctaaccctggaattggatcctcttgtcttacagatggatctggagcaacaaacttctcactactcaaacaagcaggtgacgtggaggagaatcccggccccatggcacttccagtaactgcgctgctgctcccgctcgcactcctgctgcatgcggcccgaccagaacagaagcttatctctgaagaggatcttcaggtccaactcgttcagtccggcgcggaagtaaaaaaacctggagcgtcagttaaagtatcctgtaaggcgagtggatattcatttcccgattattacattaattgggtgcgacaagcgcctggtcagggtcttgaatggatgggatggatatacttcgcgtctgggaatagtgaatacaatcagaaatttaccggcagggtgacgatgacgcgagacacctccattaatactgcctatatggaactcagctctctcacttcagaggacacagccgtctacttctgtgcctccctttatgattacgattggtattttgacgtgtggggtcaaggaactatggttactgtgtctagcgggggaggtggctcaggtgggggaggttcaggaggaggcgggtccgacatcgtgatgacacaaacccctctgagcctgagcgttacgccagggcaaccagcctccatttcatgcaagtccagccagtcactcgtgcattcaaatggaaacacctatctgcactggtatcttcaaaaaccaggtcagtcaccccagttgttgatatacaaagttagtaatcgcttctccggagtacccgatcggttcagcgggtctggttcagggacggatttcaccttgaaaattagccgagttgaggctgaagatgtgggaatttactattgcagtcagagcagcatttacccctggacgttcgggcagggcaccaagttggaaattaaggcggccgcaattgaagttatgtatcctcctccttacctagacaatgagaagagcaatggaaccattatccatgtgaaagggaaacacctttgtccaagtcccctatttcccggaccttctaagcccttttgggtgctggtggtggttggtggagtcctggcttgctatagcttgctagtaacagtggcctttattattttctgggtgaggagtaagaggagcaggctcctgcacagtgactacatgaacatgactccccgccgccccgggcccacccgcaagcattaccagccctatgccccaccacgcgacttcgcagcctatcgctccagagtgaagttcagcaggagcgcagacgcccccgcgtaccagcagggccagaaccagctctataacgagctcaatctaggacgaagagaggagtacgatgttttggacaagagacgtggccgggaccctgagatggggggaaagccgagaaggaagaaccctcaggaaggcctgtacaatgaactgcagaaagataagatggcggaggcctacagtgagattgggatgaaaggcgagcgccggaggggcaaggggcacgatggcctttaccagggtctcagtacagccaccaaggacacctacgacgcccttcacatgcaggccctgccccctcgcggaagcggagctactaacttcagcctgctgaagcaggctggagacgtggaggagaaccctggacccaatatccagaaccctgaccctgccgtgtaccagctgagagactctaaatccagtgacaagtctgtctgcctattcaccgattttgattctcaaacaaatgtgtcacaaagtaaggattctgatgtgtatatcacagacaaaactgtgctagacatgaggtctatggacttcaagagcaacagtgctgtggcctggagcaacaaatctgactttgcatgtgcaaacgccttcaacaacagcattattccagaagacaccttcttccccagcccaggtaagggcagctttggtgccttcgcaggctgtttccttgcttcaggaatggccaggttctgcccagagctctggtcaatgatgtctaaaactcctctgattggtggtctcggccttatccattgccaccaaaaccctctttttactaagaaacagtgagccttgttctggcagtccagagaatgacacgggaaaaaagcagatgaagagaaggtggcaggagagggcacgtggcccagcctcagtctctccaactgagttcctgcctgcctgcctttgctcagactgtttgccccttactgctcttctaggcctcattctaagccccttctccaagtcctacagatatccagaacctatgtggtg

SEQ ID NO: 133 - DNA, 48 bp, synthetic construct
  source 1..48: mol_type = other DNA
ttgagcaagtcacagcagctccgacagatatccagaaccgactcgcca

SEQ ID NO: 134 - DNA, 48 bp, synthetic construct
  source 1..48: mol_type = other DNA
caccacataggttctggatatctgtaggacttggagaaggggcttaga

SEQ ID NO: 135 - DNA, 2923 bp, synthetic construct
  source 1..2923: mol_type = other DNA
tggcggaccatatctgtgggacaagcggagctgctgtgacttgctcaaggccttatatcgagtaaacggtagtgctggggcttagacgcaggtgttctgatttatagttcaaaacctctatcaatgagagagcaatctcctggtaatgtgatagatttcccaacttaatgccaacataccataaacctcccattctgctaatgcccagcctaagttggggagaccactccagattccaagatgtacagtttgctttgctgggcctttttcccatgcctgcctttactctgccagagttatattgctggggttttgaagaagatcctattaaataaaagaataagcagtattattaagtagccctgcatttcaggtttccttgagtggcaggccaggcctggccgtgaacgttcactgaaatcatggcctcttggccaagattgatagcttgtgcctgtccctgagtcccagtccatcacgagcagctggtttctaagatgctatttcccgtataaagcatgagaccgtgacttgccagccccacagagccccgcccttgtccatcactggcatctggactccagcctgggttggggcaaagagggaaatgagatcatgtcctaaccctggaattggatcctcttgtcttacagatggatctggagcaacaaacttctcactactcaaacaagcaggtgacgtggaggagaatcccggccccatggcacttccagtaactgcgctgctgctcccgctcgcactcctgctgcatgcggcccgaccagaacagaagcttatctctgaagaggatcttcaggtccaactcgttcagtccggcgcggaagtaaaaaaacctggagcgtcagttaaagtatcctgtaaggcgagtggatattcatttcccgattattacattaattgggtgcgacaagcgcctggtcagggtcttgaatggatgggatggatatacttcgcgtctgggaatagtgaatacaatcagaaatttaccggcagggtgacgatgacgcgagacacctccattaatactgcctatatggaactcagctctctcacttcagaggacacagccgtctacttctgtgcctccctttatgattacgattggtattttgacgtgtggggtcaaggaactatggttactgtgtctagcgggggaggtggctcaggtgggggaggttcaggaggaggcgggtccgacatcgtgatgacacaaacccctctgagcctgagcgttacgccagggcaaccagcctccatttcatgcaagtccagccagtcactcgtgcattcaaatggaaacacctatctgcactggtatcttcaaaaaccaggtcagtcaccccagttgttgatatacaaagttagtaatcgcttctccggagtacccgatcggttcagcgggtctggttcagggacggatttcaccttgaaaattagccgagttgaggctgaagatgtgggaatttactattgcagtcagagcagcatttacccctggacgttcgggcagggcaccaagttggaaattaaggcggccgcaattgaagttatgtatcctcctccttacctagacaatgagaagagcaatggaaccattatccatgtgaaagggaaacacctttgtccaagtcccctatttcccggaccttctaagcccttttgggtgctggtggtggttggtggagtcctggcttgctatagcttgctagtaacagtggcctttattattttctgggtgaggagtaagaggagcaggctcctgcacagtgactacatgaacatgactccccgccgccccgggcccacccgcaagcattaccagccctatgccccaccacgcgacttcgcagcctatcgctccagagtgaagttcagcaggagcgcagacgcccccgcgtaccagcagggccagaaccagctctataacgagctcaatctaggacgaagagaggagtacgatgttttggacaagagacgtggccgggaccctgagatggggggaaagccgagaaggaagaaccctcaggaaggcctgtacaatgaactgcagaaagataagatggcggaggcctacagtgagattgggatgaaaggcgagcgccggaggggcaaggggcacgatggcctttaccagggtctcagtacagccaccaaggacacctacgacgcccttcacatgcaggccctgccccctcgcggaagcggagctactaacttcagcctgctgaagcaggctggagacgtggaggagaaccctggacccaatatccagaaccctgaccctgccgtgtaccagctgagagactctaaatccagtgacaagtctgtctgcctattcaccgattttgattctcaaacaaatgtgtcacaaagtaaggattctgatgtgtatatcacagacaaaactgtgctagacatgaggtctatggacttcaagagcaacagtgctgtggcctggagcaacaaatctgactttgcatgtgcaaacgccttcaacaacagcattattccagaagacaccttcttccccagcccaggtaagggcagctttggtgccttcgcaggctgtttccttgcttcaggaatggccaggttctgcccagagctctggtcaatgatgtctaaaactcctctgattggtggtctcggccttatccattgccaccaaaaccctctttttactaagaaacagtgagccttgttctggcagtccagagaatgacacgggaaaaaagcagatgaagagaaggtggcaggagagggcacgtggcccagcctcagtctctccaactgagttcctgcctgcctgcctttgctcagactgtttgccccttactgctcttctaggcctcattctaagccccttctccaagtcctcttgtcccacagatatgagatggtg

SEQ ID NO: 136 - DNA, 48 bp, synthetic construct
  source 1..48: mol_type = other DNA
ttgagcaagtcacagcagctccgcttgtcccacagatatggtccgcca

SEQ ID NO: 137 - DNA, 48 bp, synthetic construct
  source 1..48: mol_type = other DNA
caccatctcatatctgtgggacaagaggacttggagaaggggcttaga

SEQ ID NO: 138 - DNA, 2947 bp, synthetic construct
  source 1..2947: mol_type = other DNA
cactactacagtgccaatagagtcggttctggatatctgtcggagctgctgtgacttgctcaaggccttatatcgagtaaacggtagtgctggggcttagacgcaggtgttctgatttatagttcaaaacctctatcaatgagagagcaatctcctggtaatgtgatagatttcccaacttaatgccaacataccataaacctcccattctgctaatgcccagcctaagttggggagaccactccagattccaagatgtacagtttgctttgctgggcctttttcccatgcctgcctttactctgccagagttatattgctggggttttgaagaagatcctattaaataaaagaataagcagtattattaagtagccctgcatttcaggtttccttgagtggcaggccaggcctggccgtgaacgttcactgaaatcatggcctcttggccaagattgatagcttgtgcctgtccctgagtcccagtccatcacgagcagctggtttctaagatgctatttcccgtataaagcatgagaccgtgacttgccagccccacagagccccgcccttgtccatcactggcatctggactccagcctgggttggggcaaagagggaaatgagatcatgtcctaaccctggaattggatcctcttgtcttacagatggatctggagcaacaaacttctcactactcaaacaagcaggtgacgtggaggagaatcccggccccatgaaatggaaagcactctttaccgccgcaatccttcaagcacagttgccaattaccgaggctgacattgtactgacgcaaagtccccctagcttggcgatgagtctcgggaagcgagcgacgattagttgccgagcttctgaaagtgtcacaatccttggctcccacctgatccattggtaccaacaaaaacctgggcagcccccgacgcttctcattcagttggcgtctaacgtgcaaacaggagtaccggccagattttcaggctcaggctctcgcaccgactttactctgaccatcgaccctgttgaggaggatgatgtagcagtttactactgtcttcagagcagaaccattcctcgcacattcggcggtggaacgaagttggaaatcaagggctcaacaagtgggagtgggaagcccggcagcggggagggttctactaaaggccaaatacagttggttcaatccgggcctgaactgaaaaagccgggagagaccgtgaaaatttcttgcaaggctagcgggtacacttttacggattactctattaactgggttaagagggcaccgggcaaagggctgaaatggatgggctggataaacaccgagactcgggagcctgcatatgcttatgatttcagaggtagatttgcgttctctttggaaacctcagcttcaacggcctacttgcagattaataacttgaagtacgaagacaccgccacttacttctgcgctctcgattactcatacgctatggattactggggccagggcacgtccgtgaccgtgtccagcgaacagaaacttatatcagaggaagaccttgcaattgaagttatgtatcctcctccttacctagacaatgagaaaagcaatggaaccattatccatgtgaaagggaaacacctttgtccaagtcccctatttcccggaccttctaagcccttttgggtgctggtggtggttggtggagtcctggcttgctatagcttgctagtaacagtggcctttattattttctgggtgaggagtaagaggagcaggctcctgcacagtgactacatgaacatgactccccgccgccccgggcccacccgcaagcattaccagccctatgccccaccacgcgacttcgcagcctatcgctccagagtgaagttcagcaggagcgcagacgcccccgcgtaccagcagggccagaaccagctctataacgagctcaatctaggacgaagagaggagtacgatgttttggacaagagacgtggccgggaccctgagatggggggaaagccgagaaggaagaaccctcaggaaggcctgtacaatgaactgcagaaagataagatggcggaggcctacagtgagattgggatgaaaggcgagcgccggaggggcaaggggcacgatggcctttaccagggtctcagtacagccaccaaggacacctacgacgcccttcacatgcaggccctgccccctcgcggaagcggagctactaacttcagcctgctgaagcaggctggagacgtggaggagaaccctggacccaatatccagaaccctgaccctgccgtgtaccagctgagagactctaaatccagtgacaagtctgtctgcctattcaccgattttgattctcaaacaaatgtgtcacaaagtaaggattctgatgtgtatatcacagacaaaactgtgctagacatgaggtctatggacttcaagagcaacagtgctgtggcctggagcaacaaatctgactttgcatgtgcaaacgccttcaacaacagcattattccagaagacaccttcttccccagcccaggtaagggcagctttggtgccttcgcaggctgtttccttgcttcaggaatggccaggttctgcccagagctctggtcaatgatgtctaaaactcctctgattggtggtctcggccttatccattgccaccaaaaccctctttttactaagaaacagtgagccttgttctggcagtccagagaatgacacgggaaaaaagcagatgaagagaaggtggcaggagagggcacgtggcccagcctcagtctctccaactgagttcctgcctgcctgcctttgctcagactgtttgccccttactgcacttctaggcctcattctaagccccttctccaagtcctacagatatccagaacctatgcaggttatgttagtcagacg

SEQ ID NO: 139 - DNA, 43 bp, synthetic construct
  source 1..43: mol_type = other DNA
ttgagcaagtcacagcagctccgacagatatccagaaccgact

SEQ ID NO: 140 - DNA, 43 bp, synthetic construct
  source 1..43: mol_type = other DNA
cataggttctggatatctgtaggacttggagaaggggcttaga

SEQ ID NO: 141 - DNA, 1447 bp, synthetic construct
  source 1..1447: mol_type = other DNA
cttgggatccagctcagccaaggctccctatcaggcagcacttccgcctcccggggcccgcgcagctcacctccctcacctcccgccctaccccagtcacgagttgttttagggggaccgcccctccacttgctgattgggtagctcctgaaccattgttgtcctctgattggttgttcccttttcggctctgcaacaccgcctagaccgaccggatacacgggtagggcttccgctttacccgtctccctcctggcgcttgtcctcctctcccagtcggcaccacagcggtggctgccgggcgtggtgtcggtgggtcggttggtttttgtctcaccgttggtgtccgtgccgttcagttgcccgccatggctggatcgggtgggactagtggcgtgagcaagggcgaggaggataacatggccatcatcaaggagttcatgcgcttcaaggtgcacatggagggctccgtgaacggccacgagttcgagatcgagggcgagggcgagggccgcccctacgagggcacccagaccgccaagctgaaggtgaccaagggtggccccctgcccttcgcctgggacatcctgtcccctcagttcatgtacggctccaaggcctacgtgaagcaccccgccgacatccccgactacttgaagctgtccttccccgagggcttcaagtgggagcgcgtgatgaacttcgaggacggcggcgtggtgaccgtgacccaggactcctccctgcaggacggcgagttcatctacaaggtgaagctgcgcggcaccaacttcccctccgacggccccgtaatgcagaagaagaccatgggctgggaggcctcctccgagcggatgtaccccgaggacggcgccctgaagggcgagatcaagcagaggctgaagctgaaggacggcggccactacgacgctgaggtcaagaccacctacaaggccaagaagcccgtgcagctgcccggcgcctacaacgtcaacatcaagttggacatcacctcccacaacgaggactacaccatcgtggaacagtacgaacgcgccgagggccgccactccaccggcggcatggacgagctgtacaagggaaccggtgctggaagtggtgagctggatccgttcggcgcccctgccggcgcccctggcggtcccgcgctggggaacggagtggccggcgccggcgaagaagacccggctgcggccttcttggcgcagcaagagagcgagattgcgggcatcgagaacgacgaggccttcgccatcctggacggcggcgcccccgggccccagccgcacggcgagccgccggggggtccgggtgagagtgcgggcgcgtttggggcgagaggacttgtctggaaactcggtccacagtgggtccgagagcttctgtgtgactcgtgctccttgccttggctgagctggatcccaag

SEQ ID NO: 142 - DNA, 45 bp, synthetic construct
  source 1..45: mol_type = other DNA
ggaagtgctgcctgatagggagccttggctgagctggatcccaag

SEQ ID NO: 143 - DNA, 45 bp, synthetic construct
  source 1..45: mol_type = other DNA
cttgggatccagctcagccaaggcaaggagcacgagtcacacaga

SEQ ID NO: 144 - DNA, 2139 bp, synthetic construct
  source 1..2139: mol_type = other DNA
ctattgacaaacagaagacccggtacagtgcatcaagacacagctactcctgggtgacagaggttcagggccagctcactaagtaggcagaagtttttgacatatactttgagagataaagcaagattctgtacctcaaccttcagaatttcccctaccactcattatagttccggagctatatagctcctatcattctatcataaccttagaataccagagaacatatcatctcatctaattatctcttactatatgtgaaaaaaatgaaggacatgggggaagtgtgacttgccccaaatcacatatttcatggtagagggctgggcttggccatgaaggagcatgagttcactgagttccctttggcttttccatgctagcaatgcacgtggcccagcctgctgtggtactggccagcagccgaggcatcgccagctttgtgtgtgagtatgcatctccaggcaaagccactgaggtccgggtgacagtgcttcggcaggctgacagccaggtgactgaagtctgtgcggcaacctacatgatggggaatgagttgaccttcctagatgattccatctgcacgggcacctccagtggaaatcaagtgaacctcactatccaaggactgagggccatggacacgggactctacatctgcaaggtggagctcatgtacccaccgccatactacctgggcataggcaacggaacccagatttatgtaattgatccagaaccgtgcccagattctgacttcctcctctggatccttgcagcagttagttcggggttgtttttttatagctttctcctcacagctgtttctttgagcaaaatgctaaagaaaagaagccctcttacaacaggggtctatgtgaaaatgcccccaacagagccagaatgtgaaaagcaatttcagccttattttattcccatcaatggatctggaggaactagcggcagcaagggcgaggagctgttcaccggggtggtgcccatcctggtcgagctggacggcgacgtaaacggccacaagttcagcgtgcgcggcgagggcgagggcgatgccaccaacggcaagctgaccctgaagttcatctgcaccaccggcaagctgcccgtgccctggcccaccctcgtgaccaccctgacctacggcgtgcagtgcttcagccgctaccccgaccacatgaagcgccacgacttcttcaagtccgccatgcccgaaggctacgtccaggagcgcaccatcagcttcaaggacgacggcacctacaagacccgcgccgaggtgaagttcgagggcgacaccctggtgaaccgcatcgagctgaagggcatcgacttcaaggaggacggcaacatcctggggcacaagctggagtacaacttcaacagccacaacgtctatatcaccgccgacaagcagaagaacggcatcaaggccaacttcaagatccgccacaacgtggaggacggcagcgtgcagctcgccgaccactaccagcagaacacccccatcggcgacggccccgtgctgctgcccgacaaccactacctgagcacccagtccgtgctgagcaaagaccccaacgagaagcgcgatcacatggtcctgctggagttcgtgaccgccgccgggatcacttgacaccgggtcttcaacttgtttattgcagcttataatggttacaaataaagcaatagcatcacaaatttcacaaataaagcatttttttcactgcattctagttgtggtttgtccaaactcatcaatgtatcttatcatgtctggaagacctgtttacctcttctgtttgtcatatcagtgttcttcctgccacaaccatcttgaagaatctatttctcagtaagaaaatatctttatggagagtagctggaaaacagttgagagatggaggggaggctgggggtgtggagaggggaaggggtaagtgatagattcgttgaaggggggagaaaaggccgtggggatgaagctagaaggcagaagggcttgcctgggcttggccatgaaggagcatgagttcactgagttccctttggcttttccatgctaccaatgcacgtggcccagcctgctgtggtactgccgggtcttctgtttgtcacgct

SEQ ID NO: 145 - DNA, 41 bp, synthetic construct
  source 1..41: mol_type = other DNA
agcgtgacaaacagaagacccggcagtaccacagcaggctg

SEQ ID NO: 146 - DNA, 1612 bp, synthetic construct
  source 1..1612: mol_type = other DNA
aggacccttgtactccaggaaattctccaagtctccacttagttatccagatcctcaaagtgaacatgaagcttcagtttcaaattgaatacattttccatccatggattggcttgttttgttcagttgagtgcttgaggttgtcttttcgacgtaacagctaaacccacggcttcctttctcgtaaaaccaaaacaaaaaggctttctattcaagtgccttctgtgtgtgcacatgtgtaatacatatctgggatcaaagctatctatataaagtccttgattctgtgtgggttcaaacacatttcaaagcttcaggatcctgaaaggttttgctctacttcctgaagacctgaacaccgctcccataaagccatgggggcaggtgccactggccgcgccatggacgggccgcgcctgctgctgttgctgcttctgggggtgtcccttggaggtgccaaggaggcatgccccacaggcctgtacacacacagcggtgagtgctgcaaagcctgcaacctgggcgagggtgtggcccagccttgtggagccaaccagaccgtgtgtgagccctgcctggacagcgtgacgttctccgacgtggtgagcgcgaccgagccgtgcaagccgtgcaccgagtgcgtggggctccagagcatgtcggcgccatgcgtggaggccgacgacgccgtgtgccgctgcgcctacggctactaccaggatgagacgactgggcgctgcgaggcgtgccgcgtgtgcgaggcgggctcgggcctcgtgttctcctgccaggacaagcagaacaccgtgtgcgaggagtgccccgacggcacgtattccgacgaggccaaccacgtggacccgtgcctgccctgcaccgtgtgcgaggacaccgagcgccagctccgcgagtgcacacgctgggccgacgccgagtgcgaggagatccctggccgttggattacacggtccacacccccagagggctcggacagcacagcccccagcacccaggagcctgaggcacctccagaacaagacctcatagccagcacggtggcaggtgtggtgaccacagtgatgggcagctcccagcccgtggtgacccgaggcaccaccgacaacctcatccctgtctattgctccatcctggctgctgtggttgtgggtcttgtggcctacatagccttcaagaggtggaacagccgcgccaagcgctcgggttcgggtgccaccaacttcagcctgctgaagcaggccggcgacgtggaggagaaccccggccccatggcttgccttggatttcagcggcacaaggctcagctgaacctggctaccaggacctggccctgcactctcctgttttttcttctcttcatccctgtcttctgcaaaggtgagtgagacttttggagcatgaagatggaggaggtgtttctcctacctgggtttcatttgtttcagcagtcaaaggcagtgatttatagcaaagccagaagttaaaggtaaaactccaatctggcttggctggctctgtattccagggccagcagggagcagttgggcggcagcaaataaggcaaagagatagctcagaacagagcgccaggtat

SEQ ID NO: 147 - DNA, 48 bp, synthetic construct
  source 1..48: mol_type = other DNA
tccccgggtaccgagctcgaccatggctttatgggagcgcacattgtt

SEQ ID NO: 148 - DNA, 49 bp, synthetic construct
  source 1..49: mol_type = other DNA
ttgttgtgtcgctcccataaagccatggctgcaggtcgactctagagga

SEQ ID NO: 149 - DNA, 1493 bp, synthetic construct
  source 1..1493: mol_type = other DNA
actttgctctgtctgctctccgccacggccctgctctgttccctgggacacccccgcccccacctcctcaggctgcctgatctgcccagctttccagctttcctctggattccggcctctggtcatccctccccaccctctctccaaggccctctcctggtctcccttcttctagaaccccttcctccacctccctctctgcagaacttctcctttaccccccaccccccaccactgccccctttccttttctgacctccttttggagggctcagcgctgcccagaccataggagagatgggggcaggtgccactggccgcgccatggacgggccgcgcctgctgctgttgctgcttctgggggtgtcccttggaggtgccaaggaggcatgccccacaggcctgtacacacacagcggtgagtgctgcaaagcctgcaacctgggcgagggtgtggcccagccttgtggagccaaccagaccgtgtgtgagccctgcctggacagcgtgacgttctccgacgtggtgagcgcgaccgagccgtgcaagccgtgcaccgagtgcgtggggctccagagcatgtcggcgccatgcgtggaggccgacgacgccgtgtgccgctgcgcctacggctactaccaggatgagacgactgggcgctgcgaggcgtgccgcgtgtgcgaggcgggctcgggcctcgtgttctcctgccaggacaagcagaacaccgtgtgcgaggagtgccccgacggcacgtattccgacgaggccaaccacgtggacccgtgcctgccctgcaccgtgtgcgaggacaccgagcgccagctccgcgagtgcacacgctgggccgacgccgagtgcgaggagatccctggccgttggattacacggtccacacccccagagggctcggacagcacagcccccagcacccaggagcctgaggcacctccagaacaagacctcatagccagcacggtggcaggtgtggtgaccacagtgatgggcagctcccagcccgtggtgacccgaggcaccaccgacaacctcatccctgtctattgctccatcctggctgctgtggttgtgggtcttgtggcctacatagccttcaagaggtggaacagccgcgccaagcgctcgggttcgggtgccaccaacttcagcctgctgaagcaggccggcgacgtggaggagaaccccggccccatgtgggaggctcagttcctgggcttgctgtttctgcagccgctttgggtggctccaggtaaaacggggatggcgggagggttgacctccagccccacaggaggggaccagcagggatctctgtggccacaaaggtcctgaggtccttagctctgtggattcttctaatcccttttttgggcagtccttccaccccgaaagcctctctgggcagagaagaaacagaaacccaagttcttcctgcaccctgtttctccctcgggaaacacccaggctccttctct

SEQ ID NO: 150 - DNA, 48 bp, synthetic construct
  source 1..48: mol_type = other DNA
tccccgggtaccgagctcgacctcccacatctctcctatccagttgtt

SEQ ID NO: 151 - DNA, 49 bp, synthetic construct
  source 1..49: mol_type = other DNA
ttgttagttataggagagatgtgggaggctgcaggtcgactctagagga

SEQ ID NO: 152 - DNA, 1391 bp, synthetic construct
  source 1..1391: mol_type = other DNA
gcccatcatgtagtgaccgactatttttcagtgacaaaaaaaaagtctttaaaaatagaagtaaaagtctaaagtcatcaaaacaacgttatatcctgtgtgaaatgctgcagtcaggatgccttgtggtttgagtgccttgatcatgtgccctaaggggatggtggcggtggtggtggccgtggatgacggagactctcaggccttggcaggtgcgtctttcagttcccctcacacttcgggttcctcggggaggaggggctggaaccctagcccatcgtcaggacaaagatgggggcaggtgccactggccgcgccatggacgggccgcgcctgctgctgttgctgcttctgggggtgtcccttggaggtgccaaggaggcatgccccacaggcctgtacacacacagcggtgagtgctgcaaagcctgcaacctgggcgagggtgtggcccagccttgtggagccaaccagaccgtgtgtgagccctgcctggacagcgtgacgttctccgacgtggtgagcgcgaccgagccgtgcaagccgtgcaccgagtgcgtggggctccagagcatgtcggcgccatgcgtggaggccgacgacgccgtgtgccgctgcgcctacggctactaccaggatgagacgactgggcgctgcgaggcgtgccgcgtgtgcgaggcgggctcgggcctcgtgttctcctgccaggacaagcagaacaccgtgtgcgaggagtgccccgacggcacgtattccgacgaggccaaccacgtggacccgtgcctgccctgcaccgtgtgcgaggacaccgagcgccagctccgcgagtgcacacgctgggccgacgccgagtgcgaggagatccctggccgttggattacacggtccacacccccagagggctcggacagcacagcccccagcacccaggagcctgaggcacctccagaacaagacctcatagccagcacggtggcaggtgtggtgaccacagtgatgggcagctcccagcccgtggtgacccgaggcaccaccgacaacctcatccctgtctattgctccatcctggctgctgtggttgtgggtcttgtggcctacatagccttcaagaggtggaacagccgcgccaagcgctcgggttcgggtgccaccaacttcagcctgctgaagcaggccggcgacgtggaggagaaccccggccccatgctcagactgctcttagctctcaacttattcccttcaattcaagtaacaggtaaacaatgttaatgtctttctttctgtaaatattttttgaggtcttccaattggcttagtttattttaaatttctaacaatgtgtgaaatttgaacatttgaagtgtagttttgctgtaatagggcaatgtgtt

SEQ ID NO: 153 - DNA, 48 bp, synthetic construct
  source 1..48: mol_type = other DNA
tccccgggtaccgagctcgacctgagcatctttgtcctgtgctttgtt

SEQ ID NO: 154 - DNA, 49 bp, synthetic construct
  source 1..49: mol_type = other DNA
ttgttctaccaggacaaagatgctcaggctgcaggtcgactctagagga

SEQ ID NO: 155 - DNA, 1540 bp, synthetic construct
  source 1..1540: mol_type = other DNA
cccagcgcttttagcctgaaaatgagaatctggtttgctggggaagataaagggtgtcggaaaatggctgttgggtaaatcattgatgtctgccactaggaatgaaaggcaaatcaggaactggcacacatgctttcagggagatggctgcaagggagagggcaaagactgggaagttgcttatgtggtgccagactatttggaagatcatggattgcggtgtttgtgttgtgtggtcatcattttgttctttgtttacagaacagagaaagtggattgaacaaggacgcatttccccagtacatccacaacatgggggcaggtgccactggccgcgccatggacgggccgcgcctgctgctgttgctgcttctgggggtgtcccttggaggtgccaaggaggcatgccccacaggcctgtacacacacagcggtgagtgctgcaaagcctgcaacctgggcgagggtgtggcccagccttgtggagccaaccagaccgtgtgtgagccctgcctggacagcgtgacgttctccgacgtggtgagcgcgaccgagccgtgcaagccgtgcaccgagtgcgtggggctccagagcatgtcggcgccatgcgtggaggccgacgacgccgtgtgccgctgcgcctacggctactaccaggatgagacgactgggcgctgcgaggcgtgccgcgtgtgcgaggcgggctcgggcctcgtgttctcctgccaggacaagcagaacaccgtgtgcgaggagtgccccgacggcacgtattccgacgaggccaaccacgtggacccgtgcctgccctgcaccgtgtgcgaggacaccgagcgccagctccgcgagtgcacacgctgggccgacgccgagtgcgaggagatccctggccgttggattacacggtccacacccccagagggctcggacagcacagcccccagcacccaggagcctgaggcacctccagaacaagacctcatagccagcacggtggcaggtgtggtgaccacagtgatgggcagctcccagcccgtggtgacccgaggcaccaccgacaacctcatccctgtctattgctccatcctggctgctgtggttgtgggtcttgtggcctacatagccttcaagaggtggaacagccgcgccaagcgctcgggttcgggtgccaccaacttcagcctgctgaagcaggccggcgacgtggaggagaaccccggccccctgtcgacatctcgttctcggtttatcagaaataccaacgagagcggtgaagaagtcaccaccttttttgattatgattacggtgctccctgtcataaatttgacgtgaagcaaattggggcccaactcctgcctccgctctactcgctggtgttcatctttggttttgtgggcaacatgctggtcgtcctcatcttaataaactgcaaaaagctgaagtgcttgactgacatttacctgctcaacctggccatctctgatctgctttttcttattactctcccattgtgggctcactctgctgcaaatgagtggg

SEQ ID NO: 156 - DNA, 48 bp, synthetic construct
  source 1..48: mol_type = other DNA
tccccgggtaccgagctcgaccacaacatgctgtccacaagagttgtt

SEQ ID NO: 157 - DNA, 49 bp, synthetic construct
  source 1..49: mol_type = other DNA
ttgttagagtgtggacagcatgttgtggctgcaggtcgactctagagga

SEQ ID NO: 158 - DNA, 1474 bp, synthetic construct
  source 1..1474: mol_type = other DNA
gctgcagggaatatccaggaggaacaataatttcagaggctctgtctcttcatgtccttgacctctgcttacagcagcaatacttttactcagacttcctgtttctggaacttgccttcttttttgctgtgtttatacttcccttgtctgtggttagataagtataaagccctagatctaagcttctctgtcttcctccctccctcccttcctcttactctcattcatttcatacacactggctcacacatctactctctctctctatctctctcagaatgggggcaggtgccactggccgcgccatggacgggccgcgcctgctgctgttgctgcttctgggggtgtcccttggaggtgccaaggaggcatgccccacaggcctgtacacacacagcggtgagtgctgcaaagcctgcaacctgggcgagggtgtggcccagccttgtggagccaaccagaccgtgtgtgagccctgcctggacagcgtgacgttctccgacgtggtgagcgcgaccgagccgtgcaagccgtgcaccgagtgcgtggggctccagagcatgtcggcgccatgcgtggaggccgacgacgccgtgtgccgctgcgcctacggctactaccaggatgagacgactgggcgctgcgaggcgtgccgcgtgtgcgaggcgggctcgggcctcgtgttctcctgccaggacaagcagaacaccgtgtgcgaggagtgccccgacggcacgtattccgacgaggccaaccacgtggacccgtgcctgccctgcaccgtgtgcgaggacaccgagcgccagctccgcgagtgcacacgctgggccgacgccgagtgcgaggagatccctggccgttggattacacggtccacacccccagagggctcggacagcacagcccccagcacccaggagcctgaggcacctccagaacaagacctcatagccagcacggtggcaggtgtggtgaccacagtgatgggcagctcccagcccgtggtgacccgaggcaccaccgacaacctcatccctgtctattgctccatcctggctgctgtggttgtgggtcttgtggcctacatagccttcaagaggtggaacagccgcgccaagcgctcgggttcgggtgccaccaacttcagcctgctgaagcaggccggcgacgtggaggagaaccccggccccacaattctaggaactacattcgggatggttttttctttacttcaagtcgtttctggagaaagtggctatgctcaaaatggtgagtcatttctaagttttcttatggattttggattatctgtagcatggtttcaggttattcagttccctaacagacctgagtcaggcactgggtttgaatgcagtttgagaatttcccacatattcagtcattttttttaatgtttaaccaccatgacagggggcaggggatcaatactatgggtggtttataagacctcagt

SEQ ID NO: 159 - DNA, 48 bp, synthetic construct
  source 1..48: mol_type = other DNA
tccccgggtaccgagctcgacctagaattgtcattctgactctttgtt

SEQ ID NO: 160 - DNA, 49 bp, synthetic construct
  source 1..49: mol_type = other DNA
ttgttctcttcagaatgacaattctaggctgcaggtcgactctagagga

SEQ ID NO: 161 - DNA, 1608 bp, synthetic construct
  source 1..1608: mol_type = other DNA
ggtgggaggtggttgcagtttaaataaaagaggccagagaaggctgccctgatatgttgacaataagcaaagacatgaagatgtgtttcgtggaggagaaaaaaagttcatccccaaactcaattaaaaacaggctttagactataaatgccatttaaataaaatattcctgggacaaactatgttttggattaagcaagatatttaagagtacaacctgatgctaggaaggctttctttggagctatggtttccatatacatagaaagaatgtatattctttttccctataggatgggggcaggtgccactggccgcgccatggacgggccgcgcctgctgctgttgctgcttctgggggtgtcccttggaggtgccaaggaggcatgccccacaggcctgtacacacacagcggtgagtgctgcaaagcctgcaacctgggcgagggtgtggcccagccttgtggagccaaccagaccgtgtgtgagccctgcctggacagcgtgacgttctccgacgtggtgagcgcgaccgagccgtgcaagccgtgcaccgagtgcgtggggctccagagcatgtcggcgccatgcgtggaggccgacgacgccgtgtgccgctgcgcctacggctactaccaggatgagacgactgggcgctgcgaggcgtgccgcgtgtgcgaggcgggctcgggcctcgtgttctcctgccaggacaagcagaacaccgtgtgcgaggagtgccccgacggcacgtattccgacgaggccaaccacgtggacccgtgcctgccctgcaccgtgtgcgaggacaccgagcgccagctccgcgagtgcacacgctgggccgacgccgagtgcgaggagatccctggccgttggattacacggtccacacccccagagggctcggacagcacagcccccagcacccaggagcctgaggcacctccagaacaagacctcatagccagcacggtggcaggtgtggtgaccacagtgatgggcagctcccagcccgtggtgacccgaggcaccaccgacaacctcatccctgtctattgctccatcctggctgctgtggttgtgggtcttgtggcctacatagccttcaagaggtggaacagccgcgccaagcgctcgggttcgggtgccaccaacttcagcctgctgaagcaggccggcgacgtggaggagaaccccggcccctctcagtggtacgaacttcagcagcttgactcaaaattcctggagcaggttcaccagctttatgatgacagttttcccatggaaatcagacagtacctggcacagtggttagaaaagcaagactggtaaggaaaattcactagacagaagaagaagtttacaccttaaaagtactggttgattaagtgacttggggccatgtttactggaagatgaattccatcaatggccactggaattatttgttgtagaaaagtttgttgatttaaaaaatgactcaacaaagttgagccaaaaagtgtctcaacaaagttaagtatattagtcattaagcacttttatacagttttgccaaatttaatttatgatagatattcctaaatgctttggacaagttacgga

SEQ ID NO: 162 - DNA, 48 bp, synthetic construct
  source 1..48: mol_type = other DNA
tccccgggtaccgagctcgaccactgagacatcctatagccttttgtt

SEQ ID NO: 163 - DNA, 49 bp, synthetic construct
  source 1..49: mol_type = other DNA
ttgttccttctataggatgtctcagtggctgcaggtcgactctagagga

SEQ ID NO: 164 - DNA, 1431 bp, synthetic construct
  source 1..1431: mol_type = other DNA
ggaaacgacgccaggaaagctatcgcgccagagagggcgacgggggctcgggaagcctgacagggcttttgcgcacagctgccggctggctgctacccgcccgcgccagcccccgagaacgcgcgaccaggcacccagtccggtcaccgcagcggagagctcgccgctcgctgcagcgaggcccggagcggccccgcagggaccctccccagaccgcctgggccgcccggatgggggcaggtgccactggccgcgccatggacgggccgcgcctgctgctgttgctgcttctgggggtgtcccttggaggtgccaaggaggcatgccccacaggcctgtacacacacagcggtgagtgctgcaaagcctgcaacctgggcgagggtgtggcccagccttgtggagccaaccagaccgtgtgtgagccctgcctggacagcgtgacgttctccgacgtggtgagcgcgaccgagccgtgcaagccgtgcaccgagtgcgtggggctccagagcatgtcggcgccatgcgtggaggccgacgacgccgtgtgccgctgcgcctacggctactaccaggatgagacgactgggcgctgcgaggcgtgccgcgtgtgcgaggcgggctcgggcctcgtgttctcctgccaggacaagcagaacaccgtgtgcgaggagtgccccgacggcacgtattccgacgaggccaaccacgtggacccgtgcctgccctgcaccgtgtgcgaggacaccgagcgccagctccgcgagtgcacacgctgggccgacgccgagtgcgaggagatccctggccgttggattacacggtccacacccccagagggctcggacagcacagcccccagcacccaggagcctgaggcacctccagaacaagacctcatagccagcacggtggcaggtgtggtgaccacagtgatgggcagctcccagcccgtggtgacccgaggcaccaccgacaacctcatccctgtctattgctccatcctggctgctgtggttgtgggtcttgtggcctacatagccttcaagaggtggaacagccgcgccaagcgctcgggttcgggtgccaccaacttcagcctgctgaagcaggccggcgacgtggaggagaaccctggccctatgtgcactaaaatggaacagcccttctaccacgacgactcatacacagctacgggatacggccgggcccctggtggcctctctctacacgactacaaactcctgaaaccgagcctggcggtcaacctggccgacccctaccggagtctcaaagcgcctggggctcgcggacccggcccagagggcggcggtggcggcagctacttttctggtcagggctcggacaccggcgcgtctctcaagctcgcctcttcggagctggaacgcctgattgtccccaacagcaacg

SEQ ID NO: 165 - DNA, 48 bp, synthetic construct
  source 1..48: mol_type = other DNA
tccccgggtaccgagctcgacctttttagtgcacatccgccgcttgtt

SEQ ID NO: 166 - DNA, 49 bp, synthetic construct
  source 1..49: mol_type = other DNA
ttgtttattcggatgtgcactaaaaaggctgcaggtcgactctagagga

SEQ ID NO: 167 - DNA, 1444 bp, synthetic construct
  source 1..1444: mol_type = other DNA
caggcgggtaggagccttcgcgggggccgagctcggaaggcggacggctgtgcccgcccaggggatgcgcccgggccggccgcgaaggtgccttcttccgggggcccggacgaccctgacacggcacgcgcgcgcttcgcagcctcaaagactccggggcctcgtggtcactggcgcaggggatcggggcggggtgcccggagtgcggtgcctcgtggctgaagggcagctcttctccccgcagtgcagagcagagcgggcggaggaccccgggcgcgggcgcggacggcacgcggggcatgggggcaggtgccactggccgcgccatggacgggccgcgcctgctgctgttgctgcttctgggggtgtcccttggaggtgccaaggaggcatgccccacaggcctgtacacacacagcggtgagtgctgcaaagcctgcaacctgggcgagggtgtggcccagccttgtggagccaaccagaccgtgtgtgagccctgcctggacagcgtgacgttctccgacgtggtgagcgcgaccgagccgtgcaagccgtgcaccgagtgcgtggggctccagagcatgtcggcgccatgcgtggaggccgacgacgccgtgtgccgctgcgcctacggctactaccaggatgagacgactgggcgctgcgaggcgtgccgcgtgtgcgaggcgggctcgggcctcgtgttctcctgccaggacaagcagaacaccgtgtgcgaggagtgccccgacggcacgtattccgacgaggccaaccacgtggacccgtgcctgccctgcaccgtgtgcgaggacaccgagcgccagctccgcgagtgcacacgctgggccgacgccgagtgcgaggagatccctggccgttggattacacggtccacacccccagagggctcggacagcacagcccccagcacccaggagcctgaggcacctccagaacaagacctcatagccagcacggtggcaggtgtggtgaccacagtgatgggcagctcccagcccgtggtgacccgaggcaccaccgacaacctcatccctgtctattgctccatcctggctgctgtggttgtgggtcttgtggcctacatagccttcaagaggtggaacagccgcgccaagcgctcgggttcgggtgccaccaacttcagcctgctgaagcaggccggcgacgtggaggagaaccctggccctatgaacctggaaggcggcggccgaggcggagagttcggcatgagcgcggtgagctgcggcaacgggaagctccgccagtggctgatcgaccagatcgacagcggcaagtaccccgggctggtgtgggagaacgaggagaagagcatcttccgcatcccctggaagcacgcgggcaagcaggactacaaccgcgaggaggacgccgcgctcttcaaggtctccggcctcgggag

SEQ ID NO: 168 - DNA, 48 bp, synthetic construct
  source 1..48: mol_type = other DNA
tccccgggtaccgagctcgacctccaggttcatgccccggcacttgtt

SEQ ID NO: 169 - DNA, 49 bp, synthetic construct
  source 1..49: mol_type = other DNA
ttgtttgtacggggcatgaacctggaggctgcaggtcgactctagagga

SEQ ID NO: 170 - DNA, 1374 bp, synthetic construct
  source 1..1374: mol_type = other DNA
cgaggagcctcgatgtggatggccccgcgaagttaagttctgggctcgcgcttccactccgccgcgccttcctcccagtttccgtccgctcgccgcaccggcttcgttcccccaaatctcggaccgtcccttcgcgccccctccccgtccgcccccagtgctgcgttctccccctcttggctctcctgcggctgggggaggggcgggggtcaccatgggggcaggtgccactggccgcgccatggacgggccgcgcctgctgctgttgctgcttctgggggtgtcccttggaggtgccaaggaggcatgccccacaggcctgtacacacacagcggtgagtgctgcaaagcctgcaacctgggcgagggtgtggcccagccttgtggagccaaccagaccgtgtgtgagccctgcctggacagcgtgacgttctccgacgtggtgagcgcgaccgagccgtgcaagccgtgcaccgagtgcgtggggctccagagcatgtcggcgccatgcgtggaggccgacgacgccgtgtgccgctgcgcctacggctactaccaggatgagacgactgggcgctgcgaggcgtgccgcgtgtgcgaggcgggctcgggcctcgtgttctcctgccaggacaagcagaacaccgtgtgcgaggagtgccccgacggcacgtattccgacgaggccaaccacgtggacccgtgcctgccctgcaccgtgtgcgaggacaccgagcgccagctccgcgagtgcacacgctgggccgacgccgagtgcgaggagatccctggccgttggattacacggtccacacccccagagggctcggacagcacagcccccagcacccaggagcctgaggcacctccagaacaagacctcatagccagcacggtggcaggtgtggtgaccacagtgatgggcagctcccagcccgtggtgacccgaggcaccaccgacaacctcatccctgtctattgctccatcctggctgctgtggttgtgggtcttgtggcctacatagccttcaagaggtggaacagccgcgccaagcgctcgggttcgggtgccaccaacttcagcctgctgaagcaggccggcgacgtggaggagaaccctggccctatggccgaggcgcctcaggtggtggagatcgacccggacttcgagccgctgccccggccgcgctcgtgcacctggccgctgcccaggccggagtttagccagtccaactcggccacctccagcccggcgccgtcgggcagcgcggctgccaaccccgacgccgcggcgggcctgccctcggcctcggctgccgctgtcagcgccgacttcatgagcaacctgagcttgctggaggagagcgaggactt

SEQ ID NO: 171 - DNA, 48 bp, synthetic construct
  source 1..48: mol_type = other DNA
tccccgggtaccgagctcgaccatggccgaggcgcctcaccacttgtt

SEQ ID NO: 172 - DNA, 49 bp, synthetic construct
  source 1..49: mol_type = other DNA
ttgtttgtttgaggcgcctcggccatggctgcaggtcgactctagagga

SEQ ID NO: 173 - DNA, 1429 bp, synthetic construct
  source 1..1429: mol_type = other DNA
ttgaattgggaatgacagtttcagacccgaaactaggggcatggcccactaatgaggggataagttgagtgaaagaaaatgacaactgtttacagattttggcaacatttaaaccaaggcccttctccttatgcacaacaactgctttaacagctgctttttttttctccccccctccctccccccatcttggaaatccttgtatcaggtttttgagtcatgggggcaggtgccactggccgcgccatggacgggccgcgcctgctgctgttgctgcttctgggggtgtcccttggaggtgccaaggaggcatgccccacaggcctgtacacacacagcggtgagtgctgcaaagcctgcaacctgggcgagggtgtggcccagccttgtggagccaaccagaccgtgtgtgagccctgcctggacagcgtgacgttctccgacgtggtgagcgcgaccgagccgtgcaagccgtgcaccgagtgcgtggggctccagagcatgtcggcgccatgcgtggaggccgacgacgccgtgtgccgctgcgcctacggctactaccaggatgagacgactgggcgctgcgaggcgtgccgcgtgtgcgaggcgggctcgggcctcgtgttctcctgccaggacaagcagaacaccgtgtgcgaggagtgccccgacggcacgtattccgacgaggccaaccacgtggacccgtgcctgccctgcaccgtgtgcgaggacaccgagcgccagctccgcgagtgcacacgctgggccgacgccgagtgcgaggagatccctggccgttggattacacggtccacacccccagagggctcggacagcacagcccccagcacccaggagcctgaggcacctccagaacaagacctcatagccagcacggtggcaggtgtggtgaccacagtgatgggcagctcccagcccgtggtgacccgaggcaccaccgacaacctcatccctgtctattgctccatcctggctgctgtggttgtgggtcttgtggcctacatagccttcaagaggtggaacagccgcgccaagcgctcgggttcgggtgccaccaacttcagcctgctgaagcaggccggcgacgtggaggagaaccctggccctatgatgcaagaatctggcactgagacaaaaagtaacggttcagccatccagaatgggtcgggcggcagcaaccacttactagagtgcggcggtcttcgggaggggcggtccaacggagagacgccggccgtggacatcggggcagctgacctcgcccacgcccagcagcagcagcaacaggtactgggctttggagtcttgggaggtggaggtggtgggtgcgaattttactgctgaattttacacttaatcgcgatctcgcgatcagtgttttgtgttcacctgtctgtccatctgt

SEQ ID NO: 174 - DNA, 48 bp, synthetic construct
  source 1..48: mol_type = other DNA
tccccgggtaccgagctcgacccagattcttgcatcatgtgagttgtt

SEQ ID NO: 175 - DNA, 49 bp, synthetic construct
  source 1..49: mol_type = other DNA
ttgttagaccatgatgcaagaatctgggctgcaggtcgactctagagga

SEQ ID NO: 176 - DNA, 1456 bp, synthetic construct
  source 1..1456: mol_type = other DNA
ggtcaggctggtctcaaactcttgacctcaggtgattcgtctgcctcgacctcccaaagtgctgggattacaggcatgagccacacgcctggccacgacgggtgcttctttatgtagtctagtcaaagaagacctctcaaaggaggctgcagttgagcagaaacttgaaggaagggtgtgagcatgtgtagggtggtgggattagcaggtgcaaaggccctggggctggactgagctggcaccgaggagtgcagaccatgcacactgagggggcgggcccagcctgcctctaggggcagcgaggcctgggatgtgtatttacgtgtgctctctctttctcctctcccaccagggcttccttcctcggctccaccctgtggatgtaatgggggcaggtgccactggccgcgccatggacgggccgcgcctgctgctgttgctgcttctgggggtgtcccttggaggtgccaaggaggcatgccccacaggcctgtacacacacagcggtgagtgctgcaaagcctgcaacctgggcgagggtgtggcccagccttgtggagccaaccagaccgtgtgtgagccctgcctggacagcgtgacgttctccgacgtggtgagcgcgaccgagccgtgcaagccgtgcaccgagtgcgtggggctccagagcatgtcggcgccatgcgtggaggccgacgacgccgtgtgccgctgcgcctacggctactaccaggatgagacgactgggcgctgcgaggcgtgccgcgtgtgcgaggcgggctcgggcctcgtgttctcctgccaggacaagcagaacaccgtgtgcgaggagtgccccgacggcacgtattccgacgaggccaaccacgtggacccgtgcctgccctgcaccgtgtgcgaggacaccgagcgccagctccgcgagtgcacacgctgggccgacgccgagtgcgaggagatccctggccgttggattacacggtccacacccccagagggctcggacagcacagcccccagcacccaggagcctgaggcacctccagaacaagacctcatagccagcacggtggcaggtgtggtgaccacagtgatgggcagctcccagcccgtggtgacccgaggcaccaccgacaacctcatccctgtctattgctccatcctggctgctgtggttgtgggtcttgtggcctacatagccttcaagaggtggaacagccgcgccaagcgctcgggttcgggtgccaccaacttcagcctgctgaagcaggccggcgacgtggaggagaaccccggccccatggcagcacctgctctgtcctggcgtctgcccctcctcatcctcctcctgcccctggctacctcttgggcatctgcagcggtgaatggtgaggaccctgacatctgaacagctctgctttccctatggagagatggctaaggccctgctaaagcctct

SEQ ID NO: 177 - DNA, 48 bp, synthetic construct
  source 1..48: mol_type = other DNA
tccccgggtaccgagctcgacctctgctctgtcctggcgagacttgtt

SEQ ID NO: 178 - DNA, 49 bp, synthetic construct
  source 1..49: mol_type = other DNA
ttgtttgagcgccaggacagagcagaggctgcaggtcgactctagagga

SEQ ID NO: 179 - DNA, 1508 bp, synthetic construct
  source 1..1508: mol_type = other DNA
agagtgctaggcagtttcctggctgaacacgccagcccaatacttaaagagagcaactcctgactccgatagagactggatggacccacaagggtgacagcccaggcggaccgatcttcccatcccacatcctccggcgcgatgccaaaaagaggctgacggcaactgggccttctgcagagaaagacctccgcttcactgccccggctggtcccaagggtcaggaagatgggggcaggtgccactggccgcgccatggacgggccgcgcctgctgctgttgctgcttctgggggtgtcccttggaggtgccaaggaggcatgccccacaggcctgtacacacacagcggtgagtgctgcaaagcctgcaacctgggcgagggtgtggcccagccttgtggagccaaccagaccgtgtgtgagccctgcctggacagcgtgacgttctccgacgtggtgagcgcgaccgagccgtgcaagccgtgcaccgagtgcgtggggctccagagcatgtcggcgccatgcgtggaggccgacgacgccgtgtgccgctgcgcctacggctactaccaggatgagacgactgggcgctgcgaggcgtgccgcgtgtgcgaggcgggctcgggcctcgtgttctcctgccaggacaagcagaacaccgtgtgcgaggagtgccccgacggcacgtattccgacgaggccaaccacgtggacccgtgcctgccctgcaccgtgtgcgaggacaccgagcgccagctccgcgagtgcacacgctgggccgacgccgagtgcgaggagatccctggccgttggattacacggtccacacccccagagggctcggacagcacagcccccagcacccaggagcctgaggcacctccagaacaagacctcatagccagcacggtggcaggtgtggtgaccacagtgatgggcagctcccagcccgtggtgacccgaggcaccaccgacaacctcatccctgtctattgctccatcctggctgctgtggttgtgggtcttgtggcctacatagccttcaagaggtggaacagccgcgccaagcgctcgggttcgggtgccaccaacttcagcctgctgaagcaggccggcgacgtggaggagaaccccggccccatggattcatatctgctgatgtggggactgctcacgttcatcatggtgcctggctgccaggcaggtaagggcctgtgggtgcccccggaattccgggaaggctgatgggcatccctcttcccagccacagaaccagagggagtccccaggtagatggttccaagaagggagttgaatcttgggttccacctcttgcctgtgacccacggggaccccagtttatgcctcactgttccttggtctgtcaagagagcctgaaatagcattaggttctcctgtccttctcagtccttgacaattaattctgggaagaatagtgtggcatgatatttgggatatttggatgttaacagggtcccgatgagcag

SEQ ID NO: 180 - DNA, 48 bp, synthetic construct
  source 1..48: mol_type = other DNA
tccccgggtaccgagctcgacctgctgatgtggggactggagtttgtt

SEQ ID NO: 181 - DNA, 49 bp, synthetic construct
  source 1..49: mol_type = other DNA
ttgttcagacagtccccacatcagcaggctgcaggtcgactctagagga

SEQ ID NO: 182 - DNA, 1805 bp, synthetic construct
  source 1..1805: mol_type = other DNA
aggtcctgttaacccccataactattgattcagagaagtagggtggttctgaaaaatacaggcataatctctttaacttgttttataggaaccagaataagggtaatgttttcctctgtcttcaaaatcatcaataatccatgcattgtttaactcatgtcataagcaataatgcctttcatatagccattggcatcaaagaagaaacacccccttgatttgatggtaagcgtgacactacataaactcccagaaaacccacttcctttccagcaaatagaaaacaaccgagagcctgaattcactgtcagctttgaacactgaacgcgaggactgttaactgtttctggcaaacatgggggcaggtgccactggccgcgccatggacgggccgcgcctgctgctgttgctgcttctgggggtgtcccttggaggtgccaaggaggcatgccccacaggcctgtacacacacagcggtgagtgctgcaaagcctgcaacctgggcgagggtgtggcccagccttgtggagccaaccagaccgtgtgtgagccctgcctggacagcgtgacgttctccgacgtggtgagcgcgaccgagccgtgcaagccgtgcaccgagtgcgtggggctccagagcatgtcggcgccatgcgtggaggccgacgacgccgtgtgccgctgcgcctacggctactaccaggatgagacgactgggcgctgcgaggcgtgccgcgtgtgcgaggcgggctcgggcctcgtgttctcctgccaggacaagcagaacaccgtgtgcgaggagtgccccgacggcacgtattccgacgaggccaaccacgtggacccgtgcctgccctgcaccgtgtgcgaggacaccgagcgccagctccgcgagtgcacacgctgggccgacgccgagtgcgaggagatccctggccgttggattacacggtccacacccccagagggctcggacagcacagcccccagcacccaggagcctgaggcacctccagaacaagacctcatagccagcacggtggcaggtgtggtgaccacagtgatgggcagctcccagcccgtggtgacccgaggcaccaccgacaacctcatccctgtctattgctccatcctggctgctgtggttgtgggtcttgtggcctacatagccttcaagaggtggaacagccgcgccaagcgctcgggttcgggtgccaccaacttcagcctgctgaagcaggccggcgacgtggaggagaaccccggccccatgaagtcaggactctggtatttctttctcttctgcttgcgcattaaagttttaacaggtaagtggtgtattgaatatttcttattaagttataattcaagtaaacattaagaaaaagcaaaggtagaaaaattacgcacccaaaagacagtggttttggtttttgaaagtaggaatagtttcaggatatggccaagggcaccatgtcactcatgtcactgtggatggcattgagtttgcattgctgcctttgatactgtgtcttgagatgaaaaacatgtttcatcagaccattaaatttttaaattacctgcttggagttacctgtcagtggataaactagcagagtggcttactgttcttagagaaagatgaaaggcaaaatgacttgtgtcaacagaatgaaaattaaatagctctggcatttggactgggaattctttctgtggtagaaaataaaatgggaagtctttgaaaagaaggattttgattttaatcttacctggatgatctgttatctgaaatgtccagggcacca

SEQ ID NO: 183 - DNA, 48 bp, synthetic construct
  source 1..48: mol_type = other DNA
tccccgggtaccgagctcgacctgacttcatgtttgccactttttgtt

SEQ ID NO: 184 - DNA, 49 bp, synthetic construct
  source 1..49: mol_type = other DNA
ttgttcccttggcaaacatgaagtcaggctgcaggtcgactctagagga

SEQ ID NO: 185 - DNA, 1919 bp, synthetic construct
  source 1..1919: mol_type = other DNA
gtatatgtgcccacaggagccaagacggtattttccatcctcccaaaacagtagagctttgacagagatttaagggtgaccaagtcaaggaagaggcatggcatagaacggtgatgtcgggggtgggggttcagaacttccattatagaaggtaatgatttagaggagaaggtggttgagaatggtgctagtggtagtgaacagatccttcccaggatctaggtgggctgaggatttttgagtctgtgacactattgtatatccagctttagtttctgtttaccaccttacagcagcacctaatctcctagaggacttagcccgtgtcacacagcacatatttgccacaccctctgtaaagccctggtttataaggttctttccaccggaagctatgacagaggaaacgtgtgggtggggaggggtagtgggtgagggacccaggttcctgacacagacagactacacccagggaatgaagagcaagcgccatgggggcaggtgccactggccgcgccatggacgggccgcgcctgctgctgttgctgcttctgggggtgtcccttggaggtgccaaggaggcatgccccacaggcctgtacacacacagcggtgagtgctgcaaagcctgcaacctgggcgagggtgtggcccagccttgtggagccaaccagaccgtgtgtgagccctgcctggacagcgtgacgttctccgacgtggtgagcgcgaccgagccgtgcaagccgtgcaccgagtgcgtggggctccagagcatgtcggcgccatgcgtggaggccgacgacgccgtgtgccgctgcgcctacggctactaccaggatgagacgactgggcgctgcgaggcgtgccgcgtgtgcgaggcgggctcgggcctcgtgttctcctgccaggacaagcagaacaccgtgtgcgaggagtgccccgacggcacgtattccgacgaggccaaccacgtggacccgtgcctgccctgcaccgtgtgcgaggacaccgagcgccagctccgcgagtgcacacgctgggccgacgccgagtgcgaggagatccctggccgttggattacacggtccacacccccagagggctcggacagcacagcccccagcacccaggagcctgaggcacctccagaacaagacctcatagccagcacggtggcaggtgtggtgaccacagtgatgggcagctcccagcccgtggtgacccgaggcaccaccgacaacctcatccctgtctattgctccatcctggctgctgtggttgtgggtcttgtggcctacatagccttcaagaggtggaacagccgcgccaagcgctcgggttcgggtgccaccaacttcagcctgctgaagcaggccggcgacgtggaggagaaccccggccccatgttgaagccatcgttgccgtttacctccctcttattcctgcagctgcccctgctgggagtggggctgaacacgacaattctgacgcccaatgggaatgaagacaccacagctggtgggaaatctgggactggagggggctggtgagaagggtggctgtgggaaggggccgtacagagatctggtgcctgccactggccattacaatcatgtgggcagaattgaaaagtggagtgggaagggcaagggggagggttccctgcctcacgctacttcttctttctttcttgtttgtttgtttctttctttcttttgaggcagggtctcactatgttgcctaggctggtctcaaactcctggcctctagtgatcctcctgcctcagcctttcaaagcaccaggattacagacatgagccaccgtgcttggcctcctccttctgaccatcatttctctttccctccctgccttcattttctccccaatctagatttcttcctgaccactatgcccactg

SEQ ID NO: 186 - DNA, 48 bp, synthetic construct
  source 1..48: mol_type = other DNA
tccccgggtaccgagctcgaccatgttgaagccatcatttggtttgtt

SEQ ID NO: 187 - DNA, 49 bp, synthetic construct
  source 1..49: mol_type = other DNA
ttgttcaacaatgatggcttcaacatggctgcaggtcgactctagagga

SEQ ID NO: 188 - DNA, 1540 bp, synthetic construct
  source 1..1540: mol_type = other DNA
acagacagcaaactcacccagtctagtgcatgccttcttaaacatcacgagactctaagaaaaggaaactgaaaacgggaaagtccctctctctaacctggcactgcgtcgctggcttggagacaggtgacggtccctgcgggccttgtcctgattggctgggcacgcgtttaatataagtggaggcgtcgcgctggcgggcattcctgaagctgacagcattcgggccgagatgggggcaggtgccactggccgcgccatggacgggccgcgcctgctgctgttgctgcttctgggggtgtcccttggaggtgccaaggaggcatgccccacaggcctgtacacacacagcggtgagtgctgcaaagcctgcaacctgggcgagggtgtggcccagccttgtggagccaaccagaccgtgtgtgagccctgcctggacagcgtgacgttctccgacgtggtgagcgcgaccgagccgtgcaagccgtgcaccgagtgcgtggggctccagagcatgtcggcgccatgcgtggaggccgacgacgccgtgtgccgctgcgcctacggctactaccaggatgagacgactgggcgctgcgaggcgtgccgcgtgtgcgaggcgggctcgggcctcgtgttctcctgccaggacaagcagaacaccgtgtgcgaggagtgccccgacggcacgtattccgacgaggccaaccacgtggacccgtgcctgccctgcaccgtgtgcgaggacaccgagcgccagctccgcgagtgcacacgctgggccgacgccgagtgcgaggagatccctggccgttggattacacggtccacacccccagagggctcggacagcacagcccccagcacccaggagcctgaggcacctccagaacaagacctcatagccagcacggtggcaggtgtggtgaccacagtgatgggcagctcccagcccgtggtgacccgaggcaccaccgacaacctcatccctgtctattgctccatcctggctgctgtggttgtgggtcttgtggcctacatagccttcaagaggtggaacagccgcgccaagcgctcgggttcgggtgccaccaacttcagcctgctgaagcaggccggcgacgtggaggagaaccccggcccctctcgctccgtcgccttagctgtgctcgcgctactctctctttctggcctggaggctatccagcgtgagtctctcctaccctcccgctctggtccttcctctcccgctctgcaccctctgtggccctcgctgtgctctctcgctccgtgacttcccttctccaagttctccttggtggcccgccgtggggctagtccagggctggatctcggggaagcggcggggtggcctgggagtggggaagggggtgcgcacccgggacgcgcgctacttgcccctttcggcggggagcaggggagacctttggcctacggcgacgggagggtcgggacaaagtttagggcgtcgataagcgtcagagcgccgaggttgggggagggtttctcttccgctctt

SEQ ID NO: 189 - DNA, 48 bp, synthetic construct
  source 1..48: mol_type = other DNA
tccccgggtaccgagctcgaccgagatgtctcgctccgtccggttgtt

SEQ ID NO: 190 - DNA, 49 bp, synthetic construct
  source 1..49: mol_type = other DNA
ttgttaattacggagcgagacatctcggctgcaggtcgactctagagga

SEQ ID NO: 191 - DNA, 1436 bp, synthetic construct
  source 1..1436: mol_type = other DNA
ggtttcgccatgttgactaggctggtttcgaattcctgagctcaggtgatccacccaccttggcttcctaaagtgctgagataacaggcatgagccaccacgtccggaggcccctacctttgcgtgatacctgctccttcccattattttgaagaaactgctgaatccacaggggaagtgaaactatgaggggagataaagtgttggggcagagttttgagagtgataaccacaagctaagtttagaggactgagagtttgagagtcctccctgaggacccacatgtccccctttatatcctattacagggcatgggggcaggtgccactggccgcgccatggacgggccgcgcctgctgctgttgctgcttctgggggtgtcccttggaggtgccaaggaggcatgccccacaggcctgtacacacacagcggtgagtgctgcaaagcctgcaacctgggcgagggtgtggcccagccttgtggagccaaccagaccgtgtgtgagccctgcctggacagcgtgacgttctccgacgtggtgagcgcgaccgagccgtgcaagccgtgcaccgagtgcgtggggctccagagcatgtcggcgccatgcgtggaggccgacgacgccgtgtgccgctgcgcctacggctactaccaggatgagacgactgggcgctgcgaggcgtgccgcgtgtgcgaggcgggctcgggcctcgtgttctcctgccaggacaagcagaacaccgtgtgcgaggagtgccccgacggcacgtattccgacgaggccaaccacgtggacccgtgcctgccctgcaccgtgtgcgaggacaccgagcgccagctccgcgagtgcacacgctgggccgacgccgagtgcgaggagatccctggccgttggattacacggtccacacccccagagggctcggacagcacagcccccagcacccaggagcctgaggcacctccagaacaagacctcatagccagcacggtggcaggtgtggtgaccacagtgatgggcagctcccagcccgtggtgacccgaggcaccaccgacaacctcatccctgtctattgctccatcctggctgctgtggttgtgggtcttgtggcctacatagccttcaagaggtggaacagccgcgccaagcgctcgggttcgggtgccaccaacttcagcctgctgaagcaggccggcgacgtggaggagaaccccggccccgtcgcattacctatggtccttgttttgctgctggtcctgagcagaggtgagagtgaattggacgccaagatcccatccacaggggatgccacagaatggcggaatcctcacctgtccatgctggggtcctgccagccagccccctcctgccagaagtgcatcctctcacaccccagctgtgcatggtgcaagcaactggtaaagatgggcct

SEQ ID NO: 192 - DNA, 48 bp, synthetic construct
  source 1..48: mol_type = other DNA
tccccgggtaccgagctcgacctttggcaaagccaccatcgggttgtt

SEQ ID NO: 193 - DNA, 49 bp, synthetic construct
  source 1..49: mol_type = other DNA
ttgttaaatatggtggctttgccaaaggctgcaggtcgactctagagga

SEQ ID NO: 194 - DNA, 1569 bp, synthetic construct
  source 1..1569: mol_type = other DNA
gaaccagagccaggtctagagctgcaactaaatcctctgccactctaagagagctctcgctctactgccctgtctccctttgcctccccatccctctggctacagctcagctcttcccacccctgtgtctatcactgaaggagttacccccatctcaggcattgactcaggatgcccctggtttaaggtggtctggccatgagtggtggtggggacggtccctaggagggctatctatgggaggtccctggctgccccaggagataggccaagtttcttgggcacccctcagagtggccttatttttctcctccaggcaacctccaagtcccagatcatgggggcaggtgccactggccgcgccatggacgggccgcgcctgctgctgttgctgcttctgggggtgtcccttggaggtgccaaggaggcatgccccacaggcctgtacacacacagcggtgagtgctgcaaagcctgcaacctgggcgagggtgtggcccagccttgtggagccaaccagaccgtgtgtgagccctgcctggacagcgtgacgttctccgacgtggtgagcgcgaccgagccgtgcaagccgtgcaccgagtgcgtggggctccagagcatgtcggcgccatgcgtggaggccgacgacgccgtgtgccgctgcgcctacggctactaccaggatgagacgactgggcgctgcgaggcgtgccgcgtgtgcgaggcgggctcgggcctcgtgttctcctgccaggacaagcagaacaccgtgtgcgaggagtgccccgacggcacgtattccgacgaggccaaccacgtggacccgtgcctgccctgcaccgtgtgcgaggacaccgagcgccagctccgcgagtgcacacgctgggccgacgccgagtgcgaggagatccctggccgttggattacacggtccacacccccagagggctcggacagcacagcccccagcacccaggagcctgaggcacctccagaacaagacctcatagccagcacggtggcaggtgtggtgaccacagtgatgggcagctcccagcccgtggtgacccgaggcaccaccgacaacctcatccctgtctattgctccatcctggctgctgtggttgtgggtcttgtggcctacatagccttcaagaggtggaacagccgcgccaagcgctcgggttcgggtgccaccaacttcagcctgctgaagcaggccggcgacgtggaggagaaccccggcccctctctgtggggtctggtctccaagatgcccccagaaaaagtgcagcggctctatgtcgactttccccaacacctgcggcatcttctgggtgactggctggagagccagccctggtgagtcctggctgctccctgctggtcccccaagtcttccctaactcatcttccttctccttagatttttctcccctcacccatggattcagaacttgagacctgttattccatgtgtagtgacctagatttagcagggagtctgtgccccatcaagaccaggctatgaatgttgacagatggagaccccatctcttaggaggctga

SEQ ID NO: 195 - DNA, 48 bp, synthetic construct
  source 1..48: mol_type = other DNA
tccccgggtaccgagctcgacctagatcatgtctctgtgcccattgtt

SEQ ID NO: 196 - DNA, 49 bp, synthetic construct
  source 1..49: mol_type = other DNA
ttgttgtttcacagagacatgatctaggctgcaggtcgactctagagga

SEQ ID NO: 197 - DNA, 1573 bp, synthetic construct
  source 1..1573: mol_type = other DNA
gatgcatggccttgtcctgtgtgggggtggccgagagcactgccccagccctgggtaccttgggcaggaagctggcagaggccagggctgccattcaaacaggggcaggtggttttgccaggaggaagttgacagttcaacttcaaacatgggtgacgcaggccccacactgcctgctccccgtcccacccctccctgagcacgccaccccgccctctccctctctgagagcgagatacccggccagacaccctcacctgcggtgcccagctgcccaggctgaggcaagagaaggccagaaaccatgggggcaggtgccactggccgcgccatggacgggccgcgcctgctgctgttgctgcttctgggggtgtcccttggaggtgccaaggaggcatgccccacaggcctgtacacacacagcggtgagtgctgcaaagcctgcaacctgggcgagggtgtggcccagccttgtggagccaaccagaccgtgtgtgagccctgcctggacagcgtgacgttctccgacgtggtgagcgcgaccgagccgtgcaagccgtgcaccgagtgcgtggggctccagagcatgtcggcgccatgcgtggaggccgacgacgccgtgtgccgctgcgcctacggctactaccaggatgagacgactgggcgctgcgaggcgtgccgcgtgtgcgaggcgggctcgggcctcgtgttctcctgccaggacaagcagaacaccgtgtgcgaggagtgccccgacggcacgtattccgacgaggccaaccacgtggacccgtgcctgccctgcaccgtgtgcgaggacaccgagcgccagctccgcgagtgcacacgctgggccgacgccgagtgcgaggagatccctggccgttggattacacggtccacacccccagagggctcggacagcacagcccccagcacccaggagcctgaggcacctccagaacaagacctcatagccagcacggtggcaggtgtggtgaccacagtgatgggcagctcccagcccgtggtgacccgaggcaccaccgacaacctcatccctgtctattgctccatcctggctgctgtggttgtgggtcttgtggcctacatagccttcaagaggtggaacagccgcgccaagcgctcgggttcgggtgccaccaacttcagcctgctgaagcaggccggcgacgtggaggagaaccccggcccccccatggggtctctgcaaccgctggccaccttgtacctgctggggatgctgggtgagtacccctcccaggtgtcctgcgaacacccgggctcgctccagtgcaaggaaggagttcccagttttacccaaggctgactctgggatccacatgtcagccctctggagcgttgtggagatttggggccactgggatccctgcctgcccccactaagccgcagcttggccctctgtcctgcatgtcccacccgccaggagcacaaccttgcctctctcatgcgctgttgagaaccctgctttacccttccagtgcaagagagactgcaggggggacccgcatttgatggggcccagacaac

SEQ ID NO: 198 - DNA, 48 bp, synthetic construct
  source 1..48: mol_type = other DNA
tccccgggtaccgagctcgacccatgggcatggtttctgcggattgtt

SEQ ID NO: 199 - DNA, 49 bp, synthetic construct
  source 1..49: mol_type = other DNA
ttgttgaatcagaaaccatgcccatgggctgcaggtcgactctagagga

SEQ ID NO: 200 - DNA, 1585 bp, synthetic construct
  source 1..1585: mol_type = other DNA
ggcccctcatctagattctgccaggcagcgcagggggctttttgaatgtaaatgacctaatgattcaggatcctatgaccagcgactgtcaccctctgtcacctttcttctgcccctttatctctgaaggcattgaaggggccctgcatgagtcagggagggctggggggaggagcaagggtgggaggggcagggaagagggtggcttctccgacaacttaaaaggggcttgaaccacttcctccccagacaggggtagtgcgaggccgggcacagccttcctgtgtggttttaccgcccagagagcgtcatgggggcaggtgccactggccgcgccatggacgggccgcgcctgctgctgttgctgcttctgggggtgtcccttggaggtgccaaggaggcatgccccacaggcctgtacacacacagcggtgagtgctgcaaagcctgcaacctgggcgagggtgtggcccagccttgtggagccaaccagaccgtgtgtgagccctgcctggacagcgtgacgttctccgacgtggtgagcgcgaccgagccgtgcaagccgtgcaccgagtgcgtggggctccagagcatgtcggcgccatgcgtggaggccgacgacgccgtgtgccgctgcgcctacggctactaccaggatgagacgactgggcgctgcgaggcgtgccgcgtgtgcgaggcgggctcgggcctcgtgttctcctgccaggacaagcagaacaccgtgtgcgaggagtgccccgacggcacgtattccgacgaggccaaccacgtggacccgtgcctgccctgcaccgtgtgcgaggacaccgagcgccagctccgcgagtgcacacgctgggccgacgccgagtgcgaggagatccctggccgttggattacacggtccacacccccagagggctcggacagcacagcccccagcacccaggagcctgaggcacctccagaacaagacctcatagccagcacggtggcaggtgtggtgaccacagtgatgggcagctcccagcccgtggtgacccgaggcaccaccgacaacctcatccctgtctattgctccatcctggctgctgtggttgtgggtcttgtggcctacatagccttcaagaggtggaacagccgcgccaagcgctcgggttcgggtgccaccaacttcagcctgctgaagcaggccggcgacgtggaggagaaccccggccccgacctgggtgagtgagcctcttcatgtgagaaggaacagtaccagggtcttggacacccagactgaccctgtggaatgggggtggaggatgcgggtggagcgcataggggtgcttcctggagaaatcagttctgatttggtgggcattggaagctacttccagagaatgccccctgctgtcccaggaggggtgcacctgccctttcagacctggagaaggggtcagcctttggtgccagtggggacaagggaggggccgagatcatgtctttctaaaacagcagggacataagagagtggcggggctgggcttggtggtctggcagaacctgttctcatcatgagggtgataggttaggccct

SEQ ID NO: 201 - DNA, 48 bp, synthetic construct
  source 1..48: mol_type = other DNA
tccccgggtaccgagctcgacccaggtccatgacgctctgaccttgtt

SEQ ID NO: 202 - DNA, 49 bp, synthetic construct
  source 1..49: mol_type = other DNA
ttgttttgaagagcgtcatggacctgggctgcaggtcgactctagagga

SEQ ID NO: 203 - DNA, 1542 bp, synthetic construct
  source 1..1542: mol_type = other DNA
tcttttctgagtactggcccccctgagagtacagtagaagctatgaatcttccccctacaaaaaagcactcatgtaccttcaaacaaaattgttctcagtttccgtgatgctcttagataaaaaaatttacaagacctccggtttctggtttctggggccccacacaagtgtgctgggtggagagaaaatctcagtggtttttttttttttctctctaaccctgtttggtaagttccgtttttagccccggcctttttctagccaggctctcaactgtctcctgcgttgctgggaagttctggaaggaagcatgggggcaggtgccactggccgcgccatggacgggccgcgcctgctgctgttgctgcttctgggggtgtcccttggaggtgccaaggaggcatgccccacaggcctgtacacacacagcggtgagtgctgcaaagcctgcaacctgggcgagggtgtggcccagccttgtggagccaaccagaccgtgtgtgagccctgcctggacagcgtgacgttctccgacgtggtgagcgcgaccgagccgtgcaagccgtgcaccgagtgcgtggggctccagagcatgtcggcgccatgcgtggaggccgacgacgccgtgtgccgctgcgcctacggctactaccaggatgagacgactgggcgctgcgaggcgtgccgcgtgtgcgaggcgggctcgggcctcgtgttctcctgccaggacaagcagaacaccgtgtgcgaggagtgccccgacggcacgtattccgacgaggccaaccacgtggacccgtgcctgccctgcaccgtgtgcgaggacaccgagcgccagctccgcgagtgcacacgctgggccgacgccgagtgcgaggagatccctggccgttggattacacggtccacacccccagagggctcggacagcacagcccccagcacccaggagcctgaggcacctccagaacaagacctcatagccagcacggtggcaggtgtggtgaccacagtgatgggcagctcccagcccgtggtgacccgaggcaccaccgacaacctcatccctgtctattgctccatcctggctgctgtggttgtgggtcttgtggcctacatagccttcaagaggtggaacagccgcgccaagcgctcgggttcgggtgccaccaacttcagcctgctgaagcaggccggcgacgtggaggagaaccccggcccctgctccagaggttgggattcgtgtctggctctggaattgctactgctgcctctgtcactcctggtgaccagcattcaaggtactttccaccaactgtgtatctgtgattgtgcactgaaggcatggtcagttgggaaaggggagacgggatgtagttcaaccctagaagccagatctggtgtctggaaagcaggtatttccattccaatagcatggccatggcatggttggggagcctttcttagcactgatgaatggagcttcatctcctttcccacggggatgtgatcaaaacaggaacctggggagcaagagaagt

SEQ ID NO: 204 - DNA, 48 bp, synthetic construct
  source 1..48: mol_type = other DNA
tccccgggtaccgagctcgacctctggagcacatgcttcgaagttgtt

SEQ ID NO: 205 - DNA, 49 bp, synthetic construct
  source 1..49: mol_type = other DNA
ttgttaggagaagcatgtgctccagaggctgcaggtcgactctagagga

SEQ ID NO: 206 - DNA, 1218 bp, synthetic construct
  source 1..1218: mol_type = other DNA
cagcactgcctctgtcactctcgcccacgtggatgtggaggaagagggggcgggagcaaggggcgggcaccctcccttcaacctgacctgggacagtttcccttccgctcacctccgcctgagcagtggagaaggcggcactctggtggggctgctccaggcatgggggcaggtgccactggccgcgccatggacgggccgcgcctgctgctgttgctgcttctgggggtgtcccttggaggtgccaaggaggcatgccccacaggcctgtacacacacagcggtgagtgctgcaaagcctgcaacctgggcgagggtgtggcccagccttgtggagccaaccagaccgtgtgtgagccctgcctggacagcgtgacgttctccgacgtggtgagcgcgaccgagccgtgcaagccgtgcaccgagtgcgtggggctccagagcatgtcggcgccatgcgtggaggccgacgacgccgtgtgccgctgcgcctacggctactaccaggatgagacgactgggcgctgcgaggcgtgccgcgtgtgcgaggcgggctcgggcctcgtgttctcctgccaggacaagcagaacaccgtgtgcgaggagtgccccgacggcacgtattccgacgaggccaaccacgtggacccgtgcctgccctgcaccgtgtgcgaggacaccgagcgccagctccgcgagtgcacacgctgggccgacgccgagtgcgaggagatccctggccgttggattacacggtccacacccccagagggctcggacagcacagcccccagcacccaggagcctgaggcacctccagaacaagacctcatagccagcacggtggcaggtgtggtgaccacagtgatgggcagctcccagcccgtggtgacccgaggcaccaccgacaacctcatccctgtctattgctccatcctggctgctgtggttgtgggtcttgtggcctacatagccttcaagaggtggaacagccgcgccaagcgctcgggttcgggtgccaccaacttcagcctgctgaagcaggccggcgacgtggaggagaaccccggccccatgcagatcccacaggcgccctggccagtcgtctgggcggtgctacaactgggctggcggccaggatggttcttaggtaggtggggtcggcggtcaggtgtcccagagccaggggtctggagggaccttccaccctcagtccct

SEQ ID NO: 207 - DNA, 48 bp, synthetic construct
  source 1..48: mol_type = other DNA
tccccgggtaccgagctcgacctgtgggatctgcatgccacctttgtt

SEQ ID NO: 208 - DNA, 49 bp, synthetic construct
  source 1..49: mol_type = other DNA
ttgttcttgggcatgcagatcccacaggctgcaggtcgactctagagga

SEQ ID NO: 209 - DNA, 1563 bp, synthetic construct
  source 1..1563: mol_type = other DNA
ttcacatagacagctgtgggcaggatgtggggtgtttggcagagtgggagtgaaaactttttggagcaggtagaacaggagttcattttagagcaaggaaggctgtagtttaggggcacagaaagaaggctgctcccttcattagggttgaattatgaaaaaaaaccttagtgaaatttttgtatccttggatatattggaattcagtcataacattgactaattctaaggaaagaagaaaatatgtactagggctatgaacaatattttaaaactctaattctacaccttcttttatagcatgggggcaggtgccactggccgcgccatggacgggccgcgcctgctgctgttgctgcttctgggggtgtcccttggaggtgccaaggaggcatgccccacaggcctgtacacacacagcggtgagtgctgcaaagcctgcaacctgggcgagggtgtggcccagccttgtggagccaaccagaccgtgtgtgagccctgcctggacagcgtgacgttctccgacgtggtgagcgcgaccgagccgtgcaagccgtgcaccgagtgcgtggggctccagagcatgtcggcgccatgcgtggaggccgacgacgccgtgtgccgctgcgcctacggctactaccaggatgagacgactgggcgctgcgaggcgtgccgcgtgtgcgaggcgggctcgggcctcgtgttctcctgccaggacaagcagaacaccgtgtgcgaggagtgccccgacggcacgtattccgacgaggccaaccacgtggacccgtgcctgccctgcaccgtgtgcgaggacaccgagcgccagctccgcgagtgcacacgctgggccgacgccgagtgcgaggagatccctggccgttggattacacggtccacacccccagagggctcggacagcacagcccccagcacccaggagcctgaggcacctccagaacaagacctcatagccagcacggtggcaggtgtggtgaccacagtgatgggcagctcccagcccgtggtgacccgaggcaccaccgacaacctcatccctgtctattgctccatcctggctgctgtggttgtgggtcttgtggcctacatagccttcaagaggtggaacagccgcgccaagcgctcgggttcgggtgccaccaacttcagcctgctgaagcaggccggcgacgtggaggagaaccccggcccctctcagtggaatcaagtgcaacagttagaaatcaagtttttggagcaggtggatcaattctatgatgacaactttcccatggaaattcggcatctgttggcccaatggattgaaaatcaagactggtaggatcaaacatattttccctagaagttgatgcacaaatgtctgatgctctatccatgtgaatttattttatggtccactttttactcagtagatgcattcttttcaggtaaagaactttctcaaggatttgaaagccttcccaaagaaggggaataattgtcctttctggttccattcattgtaaatgaaaagttaatggttccagtgcttcttttctctgt

SEQ ID NO: 210 - DNA, 48 bp, synthetic construct
  source 1..48: mol_type = other DNA
tccccgggtaccgagctcgaccactgagacatgctataattctttgtt

SEQ ID NO: 211 - DNA, 49 bp, synthetic construct
  source 1..49: mol_type = other DNA
ttgttctccttatagcatgtctcagtggctgcaggtcgactctagagga

SEQ ID NO: 212 - DNA, 1564 bp, synthetic construct
  source 1..1564: mol_type = other DNA
ggattagggatgctcgactggtaagtaatgcagatattccaaaatctggacaaatctgaaatccaaaatgcttggaatagcagatactcaactggtagcactccctggaagaatatgcaccaaactgatagcagtggttacttctggagaggaggggaaagaaccaagattagcagtaggatcaacatatattttaatgttttctgtatttttattacttgtataatttaaacattttaaattagtaataatgaacaatcatgaaactatggatgatttagtccagcaaaatatccaattgggaaccctcatccttctgacgcagagcccaaatgggggcaggtgccactggccgcgccatggacgggccgcgcctgctgctgttgctgcttctgggggtgtcccttggaggtgccaaggaggcatgccccacaggcctgtacacacacagcggtgagtgctgcaaagcctgcaacctgggcgagggtgtggcccagccttgtggagccaaccagaccgtgtgtgagccctgcctggacagcgtgacgttctccgacgtggtgagcgcgaccgagccgtgcaagccgtgcaccgagtgcgtggggctccagagcatgtcggcgccatgcgtggaggccgacgacgccgtgtgccgctgcgcctacggctactaccaggatgagacgactgggcgctgcgaggcgtgccgcgtgtgcgaggcgggctcgggcctcgtgttctcctgccaggacaagcagaacaccgtgtgcgaggagtgccccgacggcacgtattccgacgaggccaaccacgtggacccgtgcctgccctgcaccgtgtgcgaggacaccgagcgccagctccgcgagtgcacacgctgggccgacgccgagtgcgaggagatccctggccgttggattacacggtccacacccccagagggctcggacagcacagcccccagcacccaggagcctgaggcacctccagaacaagacctcatagccagcacggtggcaggtgtggtgaccacagtgatgggcagctcccagcccgtggtgacccgaggcaccaccgacaacctcatccctgtctattgctccatcctggctgctgtggttgtgggtcttgtggcctacatagccttcaagaggtggaacagccgcgccaagcgctcgggttcgggtgccaccaacttcagcctgctgaagcaggccggcgacgtggaggagaaccccggccccgcgcagtgggaaatgctgcagaatcttgacagcccctttcaggatcagctgcaccagctttactcgcacagcctcctgcctgtggacattcgacagtacttggctgtctggattgaagaccagaactggtgaggccttcaggaagttgggggaatgaaaaaggtggttccttacttctgggcccccgggatcctggaatcattaatggcaggaaggggttggaaagcctcaggactacagtaacactgcagagacactaatacttcttattcctggtgcccaggcaggaagctgcacttgggagtgatgattccaaggct

SEQ ID NO: 213 - DNA, 48 bp, synthetic construct
  source 1..48: mol_type = other DNA
tccccgggtaccgagctcgacctactgcgccatttgggcagacttgtt

SEQ ID NO: 214 - DNA, 49 bp, synthetic construct
  source 1..49: mol_type = other DNA
ttgtttgaggcccaaatggcgcagtaggctgcaggtcgactctagagga

SEQ ID NO: 215 - DNA, 1602 bp, synthetic construct
  source 1..1602: mol_type = other DNA
atgtgccatgactgagtagcgttttcttccactgaagtattgcttcctctttgttgatatcacaggacagacatcagaacacttacaggatgtgtgtagtgtggcatgacagagaactttggtttcctttaatgtgactgtagacctggcagtgttactataagaatcactggcaatcagacacccgggtgtgctgagctagcactcagtgggggcggctactgctcatgtgattgtggagtagacagttggaagaagtacccagtccatttggagagttaaaactgtgcctaacagaggtgtcctctgacttttcttctgcaagctccatgggggcaggtgccactggccgcgccatggacgggccgcgcctgctgctgttgctgcttctgggggtgtcccttggaggtgccaaggaggcatgccccacaggcctgtacacacacagcggtgagtgctgcaaagcctgcaacctgggcgagggtgtggcccagccttgtggagccaaccagaccgtgtgtgagccctgcctggacagcgtgacgttctccgacgtggtgagcgcgaccgagccgtgcaagccgtgcaccgagtgcgtggggctccagagcatgtcggcgccatgcgtggaggccgacgacgccgtgtgccgctgcgcctacggctactaccaggatgagacgactgggcgctgcgaggcgtgccgcgtgtgcgaggcgggctcgggcctcgtgttctcctgccaggacaagcagaacaccgtgtgcgaggagtgccccgacggcacgtattccgacgaggccaaccacgtggacccgtgcctgccctgcaccgtgtgcgaggacaccgagcgccagctccgcgagtgcacacgctgggccgacgccgagtgcgaggagatccctggccgttggattacacggtccacacccccagagggctcggacagcacagcccccagcacccaggagcctgaggcacctccagaacaagacctcatagccagcacggtggcaggtgtggtgaccacagtgatgggcagctcccagcccgtggtgacccgaggcaccaccgacaacctcatccctgtctattgctccatcctggctgctgtggttgtgggtcttgtggcctacatagccttcaagaggtggaacagccgcgccaagcgctcgggttcgggtgccaccaacttcagcctgctgaagcaggccggcgacgtggaggagaaccccggccccttttcacatcttccgtttgactgtgtcctgctgctgctgctgctactacttacaagtaagtctcggcatggatatttacaatgacataatggtgctgtacagaggacaagggagagatacaaggatggccattgtaatgttgtttgtaatagcaaaagcttggaagcaacctaaatgtccgtcgatgagggagtgggtaaataaatgtgatataatcatgatacaaacagtgagtctgacaaaacatactggtatagaatgtctcaaaattataatgttattaaagaaaaaaagttgcagaataatgcatatattaggcttctatttgtgtgtgtgcattgtcggggagcaggaatatgtg

SEQ ID NO: 216 - DNA, 48 bp, synthetic construct
  source 1..48: mol_type = other DNA
tccccgggtaccgagctcgaccatgttttcacatcttccgaaattgtt

SEQ ID NO: 217 - DNA, 49 bp, synthetic construct
  source 1..49: mol_type = other DNA
ttgtttttaggaagatgtgaaaacatggctgcaggtcgactctagagga

SEQ ID NO: 218 - DNA, 1535 bp, synthetic construct
  source 1..1535: mol_type = other DNA
ttttcttccctctagtgggcggggcagaggagttagccaagatgtgactttgaaaccctcagcgtctcagtgcccttttgttctaaacaaagaattttgtaattggttctaccaaagaaggatataatgaagtcactatgggaaaagatggggaggagagttgtaggattctacattaattctcttgtgcccttagcccactacttcagaatttcctgaagaaagcaagcctgaattggttttttaaattgctttaaaaattttttttaactgggttaatgcttgctgaattggaagtgaatgggggcaggtgccactggccgcgccatggacgggccgcgcctgctgctgttgctgcttctgggggtgtcccttggaggtgccaaggaggcatgccccacaggcctgtacacacacagcggtgagtgctgcaaagcctgcaacctgggcgagggtgtggcccagccttgtggagccaaccagaccgtgtgtgagccctgcctggacagcgtgacgttctccgacgtggtgagcgcgaccgagccgtgcaagccgtgcaccgagtgcgtggggctccagagcatgtcggcgccatgcgtggaggccgacgacgccgtgtgccgctgcgcctacggctactaccaggatgagacgactgggcgctgcgaggcgtgccgcgtgtgcgaggcgggctcgggcctcgtgttctcctgccaggacaagcagaacaccgtgtgcgaggagtgccccgacggcacgtattccgacgaggccaaccacgtggacccgtgcctgccctgcaccgtgtgcgaggacaccgagcgccagctccgcgagtgcacacgctgggccgacgccgagtgcgaggagatccctggccgttggattacacggtccacacccccagagggctcggacagcacagcccccagcacccaggagcctgaggcacctccagaacaagacctcatagccagcacggtggcaggtgtggtgaccacagtgatgggcagctcccagcccgtggtgacccgaggcaccaccgacaacctcatccctgtctattgctccatcctggctgctgtggttgtgggtcttgtggcctacatagccttcaagaggtggaacagccgcgccaagcgctcgggttcgggtgccaccaacttcagcctgctgaagcaggccggcgacgtggaggagaaccccggcccctcgattcctttacctcttttgcagatatacacttcagataactacaccgaggaaatgggctcaggggactatgactccatgaaggaaccctgtttccgtgaagaaaatgctaatttcaataaaatcttcctgcccaccatctactccatcatcttcttaactggcattgtgggcaatggattggtcatcctggtcatgggttaccagaagaaactgagaagcatgacggacaagtacaggctgcacctgtcagtggccgacctcctctttgtcatcacgcttcccttctgggcagttgatgccgtggcaaactggtactttgg

SEQ ID NO: 219 - DNA, 48 bp, synthetic construct
  source 1..48: mol_type = other DNA
tccccgggtaccgagctcgacctttcctttgcctcttttcgtcttgtt

SEQ ID NO: 220 - DNA, 49 bp, synthetic construct
  source 1..49: mol_type = other DNA
ttgtttcataaaagaggcaaaggaaaggctgcaggtcgactctagagga

SEQ ID NO: 221 - DNA, 1547 bp, synthetic construct
  source 1..1547: mol_type = other DNA
acttttgtatccccacccccttaaagaaaggaggaaaaactgtttcatacagaaggcgttaattgcatgaattagagctatcacctaagtgtgggctaatgtaacaaagagggatttcacctacatccattcagtcagtctttgggggtttaaagaaattccaaagagtcatcagaagaggaaaaatgaaggtaatgttttttcagacaggtaaagtctttgaaaatatgtgtaatatgtaaaacattttgacacccccataatatttttccagaattaacagtataaattgcatctcttgttcaagagttccctatcactctctttaatcactactcacagtaacctcaactcctgccacaatgggggcaggtgccactggccgcgccatggacgggccgcgcctgctgctgttgctgcttctgggggtgtcccttggaggtgccaaggaggcatgccccacaggcctgtacacacacagcggtgagtgctgcaaagcctgcaacctgggcgagggtgtggcccagccttgtggagccaaccagaccgtgtgtgagccctgcctggacagcgtgacgttctccgacgtggtgagcgcgaccgagccgtgcaagccgtgcaccgagtgcgtggggctccagagcatgtcggcgccatgcgtggaggccgacgacgccgtgtgccgctgcgcctacggctactaccaggatgagacgactgggcgctgcgaggcgtgccgcgtgtgcgaggcgggctcgggcctcgtgttctcctgccaggacaagcagaacaccgtgtgcgaggagtgccccgacggcacgtattccgacgaggccaaccacgtggacccgtgcctgccctgcaccgtgtgcgaggacaccgagcgccagctccgcgagtgcacacgctgggccgacgccgagtgcgaggagatccctggccgttggattacacggtccacacccccagagggctcggacagcacagcccccagcacccaggagcctgaggcacctccagaacaagacctcatagccagcacggtggcaggtgtggtgaccacagtgatgggcagctcccagcccgtggtgacccgaggcaccaccgacaacctcatccctgtctattgctccatcctggctgctgtggttgtgggtcttgtggcctacatagccttcaagaggtggaacagccgcgccaagcgctcgggttcgggtgccaccaacttcagcctgctgaagcaggccggcgacgtggaggagaaccccggcccctacaggatgcaactcctgtcttgcattgcactaagtcttgcacttgtcacaaacagtgcacctacttcaagttctacaaagaaaacacagctacaactggagcatttactgctggatttacagatgattttgaatggaattaatgtaagtatatttcctttcttactaaaattattacatttagtaatctagctggagatcatttcttaataacaatgcattatactttcttagaattacaagaatcccaaactcaccaggatgctcacattt

SEQ ID NO: 222 - DNA, 48 bp, synthetic construct
  source 1..48: mol_type = other DNA
tccccgggtaccgagctcgacctgtacattgtggcaggacaacttgtt

SEQ ID NO: 223 - DNA, 49 bp, synthetic construct
  source 1..49: mol_type = other DNA
ttgtttggttcctgccacaatgtacaggctgcaggtcgactctagagga

SEQ ID NO: 224 - DNA, 1545 bp, synthetic construct
  source 1..1545: mol_type = other DNA
cagaggcaggaagtgggtaactagactaacaaaggtgcctgtggcggtttgcccatcccaggtgggagggtggggctagggctcaggggccgtgtgtgaatttacttgtagcctgagggctcagagggagcaccggtttggagctgggaccccctattttagcttttctgtggctggtgaatggggatcccaggatctcacaatctcaggtacttttggaactttccagggcaaggccccattatatctgatgttgggggagcagatcttgggggagccccttcagccccctcttccattccctcagggaccatgggggcaggtgccactggccgcgccatggacgggccgcgcctgctgctgttgctgcttctgggggtgtcccttggaggtgccaaggaggcatgccccacaggcctgtacacacacagcggtgagtgctgcaaagcctgcaacctgggcgagggtgtggcccagccttgtggagccaaccagaccgtgtgtgagccctgcctggacagcgtgacgttctccgacgtggtgagcgcgaccgagccgtgcaagccgtgcaccgagtgcgtggggctccagagcatgtcggcgccatgcgtggaggccgacgacgccgtgtgccgctgcgcctacggctactaccaggatgagacgactgggcgctgcgaggcgtgccgcgtgtgcgaggcgggctcgggcctcgtgttctcctgccaggacaagcagaacaccgtgtgcgaggagtgccccgacggcacgtattccgacgaggccaaccacgtggacccgtgcctgccctgcaccgtgtgcgaggacaccgagcgccagctccgcgagtgcacacgctgggccgacgccgagtgcgaggagatccctggccgttggattacacggtccacacccccagagggctcggacagcacagcccccagcacccaggagcctgaggcacctccagaacaagacctcatagccagcacggtggcaggtgtggtgaccacagtgatgggcagctcccagcccgtggtgacccgaggcaccaccgacaacctcatccctgtctattgctccatcctggctgctgtggttgtgggtcttgtggcctacatagccttcaagaggtggaacagccgcgccaagcgctcgggttcgggtgccaccaacttcagcctgctgaagcaggccggcgacgtggaggagaaccccggccccggctgtggctgcagctcacacccggaagatgactggatggaaaacatcgatgtgtgtgagaactgccattatcccatagtcccactggatggcaagggcacggtaagaggcgagacaggggccttggtgagggagttgggtagagaatgcaacccaggagaaagaaatgaccagcactacaggcccttgaaagaatagagtggccctctcccctgaaatacagaaaggaaaagaggcccagagaggggaagggaatctcctaagatcacacagaaagtagttggtaaactcagggataacatctaaccaggctggagaggc

SEQ ID NO: 225 - DNA, 48 bp, synthetic construct
  source 1..48: mol_type = other DNA
tccccgggtaccgagctcgaccacagcccatggtccctgtcccttgtt

SEQ ID NO: 226 - DNA, 49 bp, synthetic construct
  source 1..49: mol_type = other DNA
ttgtttttccagggaccatgggctgtggctgcaggtcgactctagagga

SEQ ID NO: 227 - DNA, 1589 bp, synthetic construct
  source 1..1589: mol_type = other DNA
atcttccctcctccccatctccaggggtgtcaggacctgtgtcagtggcctcccaggctgtccactccccagggtggaacagaagcccctctccccctgcagcccctggtgtggtccactctgccagtgtcatcgagggtgacacgcccctcaggacttcctggccttttcttccaaagcagaacatctctttgatcccagaacgattccctttctctccatcctccgcctcctgctccaaggctgattatctcttccttttcagatcccaagcactgcaagtccagatgcaacgggagcctggctcaagggacgacaagatccagccggaaagtgtagaagtcacaccccaatggcgggatagcagcccctgtgtgtgagcacccctccatgggggcaggtgccactggccgcgccatggacgggccgcgcctgctgctgttgctgcttctgggggtgtcccttggaggtgccaaggaggcatgccccacaggcctgtacacacacagcggtgagtgctgcaaagcctgcaacctgggcgagggtgtggcccagccttgtggagccaaccagaccgtgtgtgagccctgcctggacagcgtgacgttctccgacgtggtgagcgcgaccgagccgtgcaagccgtgcaccgagtgcgtggggctccagagcatgtcggcgccatgcgtggaggccgacgacgccgtgtgccgctgcgcctacggctactaccaggatgagacgactgggcgctgcgaggcgtgccgcgtgtgcgaggcgggctcgggcctcgtgttctcctgccaggacaagcagaacaccgtgtgcgaggagtgccccgacggcacgtattccgacgaggccaaccacgtggacccgtgcctgccctgcaccgtgtgcgaggacaccgagcgccagctccgcgagtgcacacgctgggccgacgccgagtgcgaggagatccctggccgttggattacacggtccacacccccagagggctcggacagcacagcccccagcacccaggagcctgaggcacctccagaacaagacctcatagccagcacggtggcaggtgtggtgaccacagtgatgggcagctcccagcccgtggtgacccgaggcaccaccgacaacctcatccctgtctattgctccatcctggctgctgtggttgtgggtcttgtggcctacatagccttcaagaggtggaacagccgcgccaagcgctcgggttcgggtgccaccaacttcagcctgctgaagcaggccggcgacgtggaggagaaccccggccccccaggtactcggcatctgttatcccctctatacctctctatatattatggagagacagggtcttgttctatcactgcggctggagtgcagtgatgtgatcataacatactgcagccctccacctccttggctcaagtgatcctcccattttagcctcccaagtagctgggaccacaggcacacacaaccaaatctggtgaattttttaaattttttgtagagacagggccttgctccgttgcccagactggtctcaaactcctggcctcaagcgatctccctgtctc

SEQ ID NO: 228 - DNA, 48 bp, synthetic construct
  source 1..48: mol_type = other DNA
tccccgggtaccgagctcgacctctccatgccaggtactgccgttgtt

SEQ ID NO: 229 - DNA, 49 bp, synthetic construct
  source 1..49: mol_type = other DNA
ttgttattaagtacctggcatggagaggctgcaggtcgactctagagga

SEQ ID NO: 230 - DNA, 1544 bp, synthetic construct
  source 1..1544: mol_type = other DNA
agatgggccccagagagtaagaaagggggaggaggacccaagctgatccaaaaggtgggtctaagcagtcaagtggaggagggttccaatctgatggcggagggcccaagctcagcctaacgaggaggccaggcccaccaaggggcccctggaggacttgtttcccttgtcccttgtggttttttgcatttcctgttcccttgctgctcattgcggaagttcctcttcttaccctgcacccagagcctcgccagagaagacaagggcagaaagcaccatgggggcaggtgccactggccgcgccatggacgggccgcgcctgctgctgttgctgcttctgggggtgtcccttggaggtgccaaggaggcatgccccacaggcctgtacacacacagcggtgagtgctgcaaagcctgcaacctgggcgagggtgtggcccagccttgtggagccaaccagaccgtgtgtgagccctgcctggacagcgtgacgttctccgacgtggtgagcgcgaccgagccgtgcaagccgtgcaccgagtgcgtggggctccagagcatgtcggcgccatgcgtggaggccgacgacgccgtgtgccgctgcgcctacggctactaccaggatgagacgactgggcgctgcgaggcgtgccgcgtgtgcgaggcgggctcgggcctcgtgttctcctgccaggacaagcagaacaccgtgtgcgaggagtgccccgacggcacgtattccgacgaggccaaccacgtggacccgtgcctgccctgcaccgtgtgcgaggacaccgagcgccagctccgcgagtgcacacgctgggccgacgccgagtgcgaggagatccctggccgttggattacacggtccacacccccagagggctcggacagcacagcccccagcacccaggagcctgaggcacctccagaacaagacctcatagccagcacggtggcaggtgtggtgaccacagtgatgggcagctcccagcccgtggtgacccgaggcaccaccgacaacctcatccctgtctattgctccatcctggctgctgtggttgtgggtcttgtggcctacatagccttcaagaggtggaacagccgcgccaagcgctcgggttcgggtgccaccaacttcagcctgctgaagcaggccggcgacgtggaggagaaccccggccccagtgggggcccaatgggaggaaggcccgggggccgaggagcaccagcggttcagcagaacataccctccaccctcctccaggaccacgagaaccagcgactctttgagatgcttggacgaaaatgcttggtgagctggggatctcctgcccccgccccgtccccaccgtttcttcctcttcctctcctccttctctctcttcccctcctcccgctcctcctttccctctccatcatctcctctcctagaatttcccgtcataatccacccttcccaggaagatctcaatgtctacttgccttccctctggctgcagctcttcctttgggcccatgactgtcatgaggcaggaagg

SEQ ID NO: 231 - DNA, 48 bp, synthetic construct
  source 1..48: mol_type = other DNA
tccccgggtaccgagctcgaccttgagtgggggcccaatccctttgtt

SEQ ID NO: 232 - DNA, 49 bp, synthetic construct
  source 1..49: mol_type = other DNA
ttgttctttattgggcccccactcaaggctgcaggtcgactctagagga

SEQ ID NO: 233 - DNA, 1549 bp, synthetic construct
  source 1..1549: mol_type = other DNA
gggctgagaccattggtaggttttatggtgttgaggaatacttaacactgattttttttttgagcgctgttaattaaatgttaaaatataatcggtttgctttagagaaaggcacgaatggattctggggctctggtatggaagttattttcgcagtgtaggtgcaaggtgagggaaccagatagggaggggagatgggcgagggtctgtggagaggggctggagtgaaatggtttgagagccatcatgtttataaaagcaatagaaggtacggtggggtaatactttctatttaatgcatttttcattttatttctttataactaatataaggcacattttacatttcagatgggggcaggtgccactggccgcgccatggacgggccgcgcctgctgctgttgctgcttctgggggtgtcccttggaggtgccaaggaggcatgccccacaggcctgtacacacacagcggtgagtgctgcaaagcctgcaacctgggcgagggtgtggcccagccttgtggagccaaccagaccgtgtgtgagccctgcctggacagcgtgacgttctccgacgtggtgagcgcgaccgagccgtgcaagccgtgcaccgagtgcgtggggctccagagcatgtcggcgccatgcgtggaggccgacgacgccgtgtgccgctgcgcctacggctactaccaggatgagacgactgggcgctgcgaggcgtgccgcgtgtgcgaggcgggctcgggcctcgtgttctcctgccaggacaagcagaacaccgtgtgcgaggagtgccccgacggcacgtattccgacgaggccaaccacgtggacccgtgcctgccctgcaccgtgtgcgaggacaccgagcgccagctccgcgagtgcacacgctgggccgacgccgagtgcgaggagatccctggccgttggattacacggtccacacccccagagggctcggacagcacagcccccagcacccaggagcctgaggcacctccagaacaagacctcatagccagcacggtggcaggtgtggtgaccacagtgatgggcagctcccagcccgtggtgacccgaggcaccaccgacaacctcatccctgtctattgctccatcctggctgctgtggttgtgggtcttgtggcctacatagccttcaagaggtggaacagccgcgccaagcgctcgggttcgggtgccaccaacttcagcctgctgaagcaggccggcgacgtggaggagaaccccggccccaatttacaacctatattttggataggactcatcagttcagtttgctgtgtgtttgctcaaacaggtaaaaacaaaaaattttcttagttgtcttttcatttccgtatcttgtattgcgctttgaccagttaggttcatatgagaacctaagtcataatcatgctgctccttctggaagccctgcaattgttcctcttactcagagaaaggtcaagttccttcatggtcaggctcccctcacccctgccacctgggatgatgggaggcaagttggctggtgaagtac

SEQ ID NO: 234 - DNA, 48 bp, synthetic construct
  source 1..48: mol_type = other DNA
tccccgggtaccgagctcgacctattttctggattggacactattgtt

SEQ ID NO: 235 - DNA, 49 bp, synthetic construct
  source 1..49: mol_type = other DNA
ttgttgctggtccaatccagaaaataggctgcaggtcgactctagagga

SEQ ID NO: 236 - DNA, 1608 bp, synthetic construct
  source 1..1608: mol_type = other DNA
agcaactgtgtgtccatcacctttttgtcaaagaagcaggagtcagtgggctacgtgcttcatgagcaggagaggcggaaactaaggaaggctcatgtgttggaggaagcatgtttgaagagcagcaggtctcacagagtttgctctttaatactctccccagcacacggaaggggaagggggtggaggttgctgctatgagagagaaaaaaaaaacagccacaatagagattctgccttcaaaggttggcttgccacctgaagcagccactgcccagggggtgcaaagaagagacagcagcgcccagcttggaggtgctaactccagaggccagcatcagcaactgggcacagaaaggagccgcctgggcagggaccatgggggcaggtgccactggccgcgccatggacgggccgcgcctgctgctgttgctgcttctgggggtgtcccttggaggtgccaaggaggcatgccccacaggcctgtacacacacagcggtgagtgctgcaaagcctgcaacctgggcgagggtgtggcccagccttgtggagccaaccagaccgtgtgtgagccctgcctggacagcgtgacgttctccgacgtggtgagcgcgaccgagccgtgcaagccgtgcaccgagtgcgtggggctccagagcatgtcggcgccatgcgtggaggccgacgacgccgtgtgccgctgcgcctacggctactaccaggatgagacgactgggcgctgcgaggcgtgccgcgtgtgcgaggcgggctcgggcctcgtgttctcctgccaggacaagcagaacaccgtgtgcgaggagtgccccgacggcacgtattccgacgaggccaaccacgtggacccgtgcctgccctgcaccgtgtgcgaggacaccgagcgccagctccgcgagtgcacacgctgggccgacgccgagtgcgaggagatccctggccgttggattacacggtccacacccccagagggctcggacagcacagcccccagcacccaggagcctgaggcacctccagaacaagacctcatagccagcacggtggcaggtgtggtgaccacagtgatgggcagctcccagcccgtggtgacccgaggcaccaccgacaacctcatccctgtctattgctccatcctggctgctgtggttgtgggtcttgtggcctacatagccttcaagaggtggaacagccgcgccaagcgctcgggttcgggtgccaccaacttcagcctgctgaagcaggccggcgacgtggaggagaaccccggccccgcacggccacatccctggtggctgtgcgttctggggaccctggtggggctctcagctactccagcccccaagagctgcccagagaggcactactgggctcagggaaagctgtgctgccagatgtgtgagccaggtaagagggggccttggtaagggccaggtgagtggcgaaagagagaggactggggttaatacagtaaataggcgcagggtgagactgagctcaagcaaggagggaaatcctgcagctgtggggaggcaccaccttgaagagggcagagaaccagcccttctcaggccttgatcccttaccctctc

SEQ ID NO: 237 - DNA, 48 bp, synthetic construct
  source 1..48: mol_type = other DNA
tccccgggtaccgagctcgaccttggcacggccacatccgaccttgtt

SEQ ID NO: 238 - DNA, 49 bp, synthetic construct
  source 1..49: mol_type = other DNA
ttgttttgaggatgtggccgtgccaaggctgcaggtcgactctagagga

SEQ ID NO: 239 - DNA, 1599 bp, synthetic construct
  source 1..1599: mol_type = other DNA
agtcctgcactcgcccggctgggtcgagctcggtacccggggactctggtctgccccgccccaggccttgacctcctccctgtggagatgcaggggcagtgggggatacagggacgccctgctctcagggcagctctcagggaggcagtgctggggaggggtaggtgagaccgcccctcccaccgggcccacagcaccaccctggtctgaggcaccgcctccaggaagccctctctgagctctgagcgcctgcggtctcctgtgtgctgctctctgtggggtcctgtagacccagagaggctcagctgcactcgcccggctgcgagagctgggagtggccaccatgggtgctggtgcaacggggagggctatggatggaccaaggctccttcttcttttgctcttgggcgttagtctgggtggagctaaagaggcatgccccaccggactttacacacattccggtgagtgttgcaaggcctgcaacctgggagaaggcgtcgctcaaccctgcggggcgaatcaaaccgtatgcgaaccttgcctcgattctgttacattctccgatgtcgtctctgcgacggaaccctgcaagccatgcacggaatgtgtcgggttgcaaagtatgtcagctccttgcgttgaagcagacgatgcggtgtgtagatgtgcctatgggtattatcaagacgaaacgacgggacggtgtgaagcatgtcgagtatgcgaggcgggcagtggcctcgtcttctcttgtcaggacaagcaaaacactgtctgtgaagaatgccctgatgggacttatagtgatgaggcgaatcacgtcgatccatgtcttccctgtactgtctgtgaagacactgagagacaattgcgagagtgtacgcgatgggccgacgcagagtgcgaggagatcccaggtcgatggataaccaggtcaacccctcctgagggatctgatagtaccgcgccctccacccaagaacccgaagctccacctgagcaagacctcatagcgtccacagtagcaggagttgtcacaaccgtcatgggaagttcacaaccagtagttaccaggggtaccacggataacctcattccggtgtactgcagcattctcgccgctgtggttgtcggacttgttgcatacattgccttcaaacgctggaatagccgcgccaagcgctcgggttcgggtgccaccaacttcagcctgctgaagcaggccggcgacgtggaggagaaccccggccccgccgggcctccgagactgctcctcctgcccctgcttctggcgctggctcgcggcctgcctggggccctggctgcccaaggtaagagcttcccaggctctccatggccacagctccagagctctccctgccccatgagctcagagcccccagtctgagccacagcacagcccccaggaagcgggtggggtgctgagcggcctccagtgtctgaggactcatttaagagaaggaaaaagggtggaccccggtggggagtggccggggctgtccaggcagggccgctgctttgggaggaagaatcctctagagtcgacctgcagcccagccgggcgagtgcaggact

SEQ ID NO: 240 - DNA, 43 bp, synthetic construct
  source 1..43: mol_type = other DNA
tccccgggtaccgagctcgacccagccgggcgagtgcaggact

SEQ ID NO: 241 - DNA, 44 bp, synthetic construct
  source 1..44: mol_type = other DNA
agtcctgcactcgcccggctgggctgcaggtcgactctagagga

SEQ ID NO: 242 - DNA, 1599 bp, synthetic construct
  source 1..1599: mol_type = other DNA
ggtcaagcaggggcagcagcaggtcgagctcggtacccggggactctggtctgccccgccccaggccttgacctcctccctgtggagatgcaggggcagtgggggatacagggacgccctgctctcagggcagctctcagggaggcagtgctggggaggggtaggtgagaccgcccctcccaccgggcccacagcaccaccctggtctgaggcaccgcctccaggaagccctctctgagctctgagcgcctgcggtctcctgtgtgctgctctctgtggggtcctgtagacccagagaggctcagctgcactcgcccggctgcgagagctgggagtggccaccatgggtgctggtgcaacggggagggctatggatggaccaaggctccttcttcttttgctcttgggcgttagtctgggtggagctaaagaggcatgccccaccggactttacacacattccggtgagtgttgcaaggcctgcaacctgggagaaggcgtcgctcaaccctgcggggcgaatcaaaccgtatgcgaaccttgcctcgattctgttacattctccgatgtcgtctctgcgacggaaccctgcaagccatgcacggaatgtgtcgggttgcaaagtatgtcagctccttgcgttgaagcagacgatgcggtgtgtagatgtgcctatgggtattatcaagacgaaacgacgggacggtgtgaagcatgtcgagtatgcgaggcgggcagtggcctcgtcttctcttgtcaggacaagcaaaacactgtctgtgaagaatgccctgatgggacttatagtgatgaggcgaatcacgtcgatccatgtcttccctgtactgtctgtgaagacactgagagacaattgcgagagtgtacgcgatgggccgacgcagagtgcgaggagatcccaggtcgatggataaccaggtcaacccctcctgagggatctgatagtaccgcgccctccacccaagaacccgaagctccacctgagcaagacctcatagcgtccacagtagcaggagttgtcacaaccgtcatgggaagttcacaaccagtagttaccaggggtaccacggataacctcattccggtgtactgcagcattctcgccgctgtggttgtcggacttgttgcatacattgccttcaaacgctggaatagccgcgccaagcgctcgggttcgggtgccaccaacttcagcctgctgaagcaggccggcgacgtggaggagaaccccggccccgccgggcctccgagactgctcctcctgcccctgcttctggcgctggctcgcggcctgcctggggccctggctgcccaaggtaagagcttcccaggctctccatggccacagctccagagctctccctgccccatgagctcagagcccccagtctgagccacagcacagcccccaggaagcgggtggggtgctgagcggcctccagtgtctgaggactcatttaagagaaggaaaaagggtggaccccggtggggagtggccggggctgtccaggcagggccgctgctttgggaggaagaatcctctagagtcgacctgcagcctgctgctgcccctgcttgacc

SEQ ID NO: 243 - DNA, 43 bp, synthetic construct
  source 1..43: mol_type = other DNA
tccccgggtaccgagctcgacctgctgctgcccctgcttgacc

SEQ ID NO: 244 - DNA, 44 bp, synthetic construct
  source 1..44: mol_type = other DNA
ggtcaagcaggggcagcagcaggctgcaggtcgactctagagga

SEQ ID NO: 245 - DNA, 1599 bp, synthetic construct
  source 1..1599: mol_type = other DNA
ggtatgctagctcacgataaaggtcgagctcggtacccggggaacaataactatttccctcttgtcccctcaaaaccctaaaacaaaacctagcctatttaacatatatttaatcttccaatagggtttggcgttgttgtcagcctcggggagagagattggacaaatattctccaagaggaggagggcgacgccaaggactttccacatcaactgctttggggtatctccacaagttggaagagggaccctttcgttttgcattgcgtgtgttgtgctcattaccagtgcagcgactgccgtcccagggtgactctgagttgtcgtttatcgtcagctaaccatgggtgctggtgcaacggggagggctatggatggaccaaggctccttcttcttttgctcttgggcgttagtctgggtggagctaaagaggcatgccccaccggactttacacacattccggtgagtgttgcaaggcctgcaacctgggagaaggcgtcgctcaaccctgcggggcgaatcaaaccgtatgcgaaccttgcctcgattctgttacattctccgatgtcgtctctgcgacggaaccctgcaagccatgcacggaatgtgtcgggttgcaaagtatgtcagctccttgcgttgaagcagacgatgcggtgtgtagatgtgcctatgggtattatcaagacgaaacgacgggacggtgtgaagcatgtcgagtatgcgaggcgggcagtggcctcgtcttctcttgtcaggacaagcaaaacactgtctgtgaagaatgccctgatgggacttatagtgatgaggcgaatcacgtcgatccatgtcttccctgtactgtctgtgaagacactgagagacaattgcgagagtgtacgcgatgggccgacgcagagtgcgaggagatcccaggtcgatggataaccaggtcaacccctcctgagggatctgatagtaccgcgccctccacccaagaacccgaagctccacctgagcaagacctcatagcgtccacagtagcaggagttgtcacaaccgtcatgggaagttcacaaccagtagttaccaggggtaccacggataacctcattccggtgtactgcagcattctcgccgctgtggttgtcggacttgttgcatacattgccttcaaacgctggaatagccgcgccaagcgctcgggttcgggtgccaccaacttcagcctgctgaagcaggccggcgacgtggaggagaaccccggccccgctagcgaagacaatcgtgtcccttctccccctcctacaggtgatgacgggggaggtggagggagagaagaaacccctactgaagggggtgcattgtctctgaaaccagggctccccatcaggggcatcagaatgaaatttgccgtgttgaccggtttggttgaagttggagaagtatccaatagggatattgtagaaactgtctttaacctggtaagtccatgaatattttataagcatatactcttttcagtgggttggggaacaagatcttaaagctggagccatgtggtttactcatcctctagagtcgacctgcagcctttatcgtgagctagcatacc

SEQ ID NO: 246 - DNA, 43 bp, synthetic construct
  source 1..43: mol_type = other DNA
tccccgggtaccgagctcgacctttatcgtgagctagcatacc

SEQ ID NO: 247 - DNA, 44 bp, synthetic construct
  source 1..44: mol_type = other DNA
ggtatgctagctcacgataaaggctgcaggtcgactctagagga

SEQ ID NO: 248 - DNA, 1599 bp, synthetic construct
  source 1..1599: mol_type = other DNA
ggaatatcgtgagctagcaatggtcgagctcggtacccggggaacaataactatttccctcttgtcccctcaaaaccctaaaacaaaacctagcctatttaacatatatttaatcttccaatagggtttggcgttgttgtcagcctcggggagagagattggacaaatattctccaagaggaggagggcgacgccaaggactttccacatcaactgctttggggtatctccacaagttggaagagggaccctttcgttttgcattgcgtgtgttgtgctcattaccagtgcagcgactgccgtcccagggtgactctgagttgtcgtttatcgtcagctaaccatgggtgctggtgcaacggggagggctatggatggaccaaggctccttcttcttttgctcttgggcgttagtctgggtggagctaaagaggcatgccccaccggactttacacacattccggtgagtgttgcaaggcctgcaacctgggagaaggcgtcgctcaaccctgcggggcgaatcaaaccgtatgcgaaccttgcctcgattctgttacattctccgatgtcgtctctgcgacggaaccctgcaagccatgcacggaatgtgtcgggttgcaaagtatgtcagctccttgcgttgaagcagacgatgcggtgtgtagatgtgcctatgggtattatcaagacgaaacgacgggacggtgtgaagcatgtcgagtatgcgaggcgggcagtggcctcgtcttctcttgtcaggacaagcaaaacactgtctgtgaagaatgccctgatgggacttatagtgatgaggcgaatcacgtcgatccatgtcttccctgtactgtctgtgaagacactgagagacaattgcgagagtgtacgcgatgggccgacgcagagtgcgaggagatcccaggtcgatggataaccaggtcaacccctcctgagggatctgatagtaccgcgccctccacccaagaacccgaagctccacctgagcaagacctcatagcgtccacagtagcaggagttgtcacaaccgtcatgggaagttcacaaccagtagttaccaggggtaccacggataacctcattccggtgtactgcagcattctcgccgctgtggttgtcggacttgttgcatacattgccttcaaacgctggaatagccgcgccaagcgctcgggttcgggtgccaccaacttcagcctgctgaagcaggccggcgacgtggaggagaaccccggccccgctagcgaagacaatcgtgtcccttctccccctcctacaggtgatgacgggggaggtggagggagagaagaaacccctactgaagggggtgcattgtctctgaaaccagggctccccatcaggggcatcagaatgaaatttgccgtgttgaccggtttggttgaagttggagaagtatccaatagggatattgtagaaactgtctttaacctggtaagtccatgaatattttataagcatatactcttttcagtgggttggggaacaagatcttaaagctggagccatgtggtttactcatcctctagagtcgacctgcagccattgctagctcacgatattcc

SEQ ID NO: 249 - DNA, 43 bp, synthetic construct
  source 1..43: mol_type = other DNA
tccccgggtaccgagctcgaccattgctagctcacgatattcc

SEQ ID NO: 250 - DNA, 44 bp, synthetic construct
  source 1..44: mol_type = other DNA
ggaatatcgtgagctagcaatggctgcaggtcgactctagagga

SEQ ID NO: 251 - DNA, 1599 bp, synthetic construct
  source 1..1599: mol_type = other DNA
tttcttgaaatggtatcttctggtcgagctcggtacccggggatgacatttcaaggcaagaatgaatatatggaagaagaaacttgtttcttctttacttacaaaaaggaaagcctggaagtgaatgatatgggtataagtaaaaacaagaaaaaaaacaaaaaacctttacgtaacgtttttgctgggagagaagactacgaagcacattttccaggaagtgtgggctgcaacgattgtgcgctcttaactaatcctgagtaaggtggccactttgacagtcttctcatgctgcctctgccaccttctctgcgagaagatacgatttcaactttaacacagcatgggtgctggtgcaacggggagggctatggatggaccaaggctccttcttcttttgctcttgggcgttagtctgggtggagctaaagaggcatgccccaccggactttacacacattccggtgagtgttgcaaggcctgcaacctgggagaaggcgtcgctcaaccctgcggggcgaatcaaaccgtatgcgaaccttgcctcgattctgttacattctccgatgtcgtctctgcgacggaaccctgcaagccatgcacggaatgtgtcgggttgcaaagtatgtcagctccttgcgttgaagcagacgatgcggtgtgtagatgtgcctatgggtattatcaagacgaaacgacgggacggtgtgaagcatgtcgagtatgcgaggcgggcagtggcctcgtcttctcttgtcaggacaagcaaaacactgtctgtgaagaatgccctgatgggacttatagtgatgaggcgaatcacgtcgatccatgtcttccctgtactgtctgtgaagacactgagagacaattgcgagagtgtacgcgatgggccgacgcagagtgcgaggagatcccaggtcgatggataaccaggtcaacccctcctgagggatctgatagtaccgcgccctccacccaagaacccgaagctccacctgagcaagacctcatagcgtccacagtagcaggagttgtcacaaccgtcatgggaagttcacaaccagtagttaccaggggtaccacggataacctcattccggtgtactgcagcattctcgccgctgtggttgtcggacttgttgcatacattgccttcaaacgctggaatagccgcgccaagcgctcgggttcgggtgccaccaacttcagcctgctgaagcaggccggcgacgtggaggagaaccccggccccatcgaaacatacaatcaaacttctccccgatctgcggccactggactgcccatcagcatgaaaatttttatgtatttacttactgtttttcttatcacccagatgattgggtcagcactttttgctgtgtatcttcatagaaggttggacaaggtaagatgaaccacaagcctttattaactaaatttggggtccttactaattcataggttggttctacccaaatgatggatgatggtagaaaccaaatagaagaatggtcttgtggcataatgtttgttgcctagtcaatgaagtctctcctctagagtcgacctgcagccagaagataccatttcaagaaa

SEQ ID NO: 252 - DNA, 43 bp, synthetic construct
  source 1..43: mol_type = other DNA
tccccgggtaccgagctcgaccagaagataccatttcaagaaa

SEQ ID NO: 253 - DNA, 44 bp, synthetic construct
  source 1..44: mol_type = other DNA
tttcttgaaatggtatcttctggctgcaggtcgactctagagga

SEQ ID NO: 254 - DNA, 1599 bp, synthetic construct
  source 1..1599: mol_type = other DNA
tacgtgtgttaaagttgaaatggtcgagctcggtacccggggatgacatttcaaggcaagaatgaatatatggaagaagaaacttgtttcttctttacttacaaaaaggaaagcctggaagtgaatgatatgggtataagtaaaaacaagaaaaaaaacaaaaaacctttacgtaacgtttttgctgggagagaagactacgaagcacattttccaggaagtgtgggctgcaacgattgtgcgctcttaactaatcctgagtaaggtggccactttgacagtcttctcatgctgcctctgccaccttctctgcgagaagatacgatttcaactttaacacagcatgggtgctggtgcaacggggagggctatggatggaccaaggctccttcttcttttgctcttgggcgttagtctgggtggagctaaagaggcatgccccaccggactttacacacattccggtgagtgttgcaaggcctgcaacctgggagaaggcgtcgctcaaccctgcggggcgaatcaaaccgtatgcgaaccttgcctcgattctgttacattctccgatgtcgtctctgcgacggaaccctgcaagccatgcacggaatgtgtcgggttgcaaagtatgtcagctccttgcgttgaagcagacgatgcggtgtgtagatgtgcctatgggtattatcaagacgaaacgacgggacggtgtgaagcatgtcgagtatgcgaggcgggcagtggcctcgtcttctcttgtcaggacaagcaaaacactgtctgtgaagaatgccctgatgggacttatagtgatgaggcgaatcacgtcgatccatgtcttccctgtactgtctgtgaagacactgagagacaattgcgagagtgtacgcgatgggccgacgcagagtgcgaggagatcccaggtcgatggataaccaggtcaacccctcctgagggatctgatagtaccgcgccctccacccaagaacccgaagctccacctgagcaagacctcatagcgtccacagtagcaggagttgtcacaaccgtcatgggaagttcacaaccagtagttaccaggggtaccacggataacctcattccggtgtactgcagcattctcgccgctgtggttgtcggacttgttgcatacattgccttcaaacgctggaatagccgcgccaagcgctcgggttcgggtgccaccaacttcagcctgctgaagcaggccggcgacgtggaggagaaccccggccccatcgaaacatacaatcaaacttctccccgatctgcggccactggactgcccatcagcatgaaaatttttatgtatttacttactgtttttcttatcacccagatgattgggtcagcactttttgctgtgtatcttcatagaaggttggacaaggtaagatgaaccacaagcctttattaactaaatttggggtccttactaattcataggttggttctacccaaatgatggatgatggtagaaaccaaatagaagaatggtcttgtggcataatgtttgttgcctagtcaatgaagtctctcctctagagtcgacctgcagccatttcaactttaacacacgta

SEQ ID NO: 255 - DNA, 43 bp, synthetic construct
  source 1..43: mol_type = other DNA
tccccgggtaccgagctcgaccatttcaactttaacacacgta

SEQ ID NO: 256 - DNA, 44 bp, synthetic construct
  source 1..44: mol_type = other DNA
tacgtgtgttaaagttgaaatggctgcaggtcgactctagagga

SEQ ID NO: 257 - DNA, 1599 bp, synthetic construct
  source 1..1599: mol_type = other DNA
tgcaaatgtgaggggtctcccggtcgagctcggtacccggggattctaaatgagtctttgaaagattctgttctagcaacttcaagccattttggactccgaaaactccgcaatatttcacaactgcgcatgcgtgcttggaaagcgtcagcgcgctagatgtttacgtatcgagaaaggggcgggtcattatctttagcggaccaatgaaaacgctccagattatcttttttctattggccgaccggggccaattagaaatcaaccttcttttagcgggcgtgtagcgccagcgcgctgtgacgtaatgtgaggggtctcgccgcagggctgagctcgaccaatgggtgctggtgcaacggggagggctatggatggaccaaggctccttcttcttttgctcttgggcgttagtctgggtggagctaaagaggcatgccccaccggactttacacacattccggtgagtgttgcaaggcctgcaacctgggagaaggcgtcgctcaaccctgcggggcgaatcaaaccgtatgcgaaccttgcctcgattctgttacattctccgatgtcgtctctgcgacggaaccctgcaagccatgcacggaatgtgtcgggttgcaaagtatgtcagctccttgcgttgaagcagacgatgcggtgtgtagatgtgcctatgggtattatcaagacgaaacgacgggacggtgtgaagcatgtcgagtatgcgaggcgggcagtggcctcgtcttctcttgtcaggacaagcaaaacactgtctgtgaagaatgccctgatgggacttatagtgatgaggcgaatcacgtcgatccatgtcttccctgtactgtctgtgaagacactgagagacaattgcgagagtgtacgcgatgggccgacgcagagtgcgaggagatcccaggtcgatggataaccaggtcaacccctcctgagggatctgatagtaccgcgccctccacccaagaacccgaagctccacctgagcaagacctcatagcgtccacagtagcaggagttgtcacaaccgtcatgggaagttcacaaccagtagttaccaggggtaccacggataacctcattccggtgtactgcagcattctcgccgctgtggttgtcggacttgttgcatacattgccttcaaacgctggaatagccgcgccaagcgctcgggttcgggtgccaccaacttcagcctgctgaagcaggccggcgacgtggaggagaaccccggccccaggaaaggcaaggggccgatttgcctgttctcacgccccaccctcagacctagccggagcaaagtttcacttatagaagggagaggagcgaacatggcagcgcgttggcggttttggtgtgtctctgtgaccatggtggtggcgctgctcatcgtttgcgacgttccctcagcctctgcccaaagaaagaaggaggtgagaacgcggtttccagcagcatgggcttttcccaatgactggggcttaagagggtctgttcgcctcttcccagccccctttccctgccgcttctatgccttttcctctagagtcgacctgcagccgggagacccctcacatttgca

SEQ ID NO: 258 - DNA, 43 bp, synthetic construct
  source 1..43: mol_type = other DNA
tccccgggtaccgagctcgaccgggagacccctcacatttgca

SEQ ID NO: 259 - DNA, 44 bp, synthetic construct
  source 1..44: mol_type = other DNA
tgcaaatgtgaggggtctcccggctgcaggtcgactctagagga

SEQ ID NO: 260 - DNA, 1599 bp, synthetic construct
  source 1..1599: mol_type = other DNA
ccggccttgcctttcctcattggtcgagctcggtacccggggattctaaatgagtctttgaaagattctgttctagcaacttcaagccattttggactccgaaaactccgcaatatttcacaactgcgcatgcgtgcttggaaagcgtcagcgcgctagatgtttacgtatcgagaaaggggcgggtcattatctttagcggaccaatgaaaacgctccagattatcttttttctattggccgaccggggccaattagaaatcaaccttcttttagcgggcgtgtagcgccagcgcgctgtgacgtaatgtgaggggtctcgccgcagggctgagctcgaccaatgggtgctggtgcaacggggagggctatggatggaccaaggctccttcttcttttgctcttgggcgttagtctgggtggagctaaagaggcatgccccaccggactttacacacattccggtgagtgttgcaaggcctgcaacctgggagaaggcgtcgctcaaccctgcggggcgaatcaaaccgtatgcgaaccttgcctcgattctgttacattctccgatgtcgtctctgcgacggaaccctgcaagccatgcacggaatgtgtcgggttgcaaagtatgtcagctccttgcgttgaagcagacgatgcggtgtgtagatgtgcctatgggtattatcaagacgaaacgacgggacggtgtgaagcatgtcgagtatgcgaggcgggcagtggcctcgtcttctcttgtcaggacaagcaaaacactgtctgtgaagaatgccctgatgggacttatagtgatgaggcgaatcacgtcgatccatgtcttccctgtactgtctgtgaagacactgagagacaattgcgagagtgtacgcgatgggccgacgcagagtgcgaggagatcccaggtcgatggataaccaggtcaacccctcctgagggatctgatagtaccgcgccctccacccaagaacccgaagctccacctgagcaagacctcatagcgtccacagtagcaggagttgtcacaaccgtcatgggaagttcacaaccagtagttaccaggggtaccacggataacctcattccggtgtactgcagcattctcgccgctgtggttgtcggacttgttgcatacattgccttcaaacgctggaatagccgcgccaagcgctcgggttcgggtgccaccaacttcagcctgctgaagcaggccggcgacgtggaggagaaccccggccccaggaaaggcaaggggccgatttgcctgttctcacgccccaccctcagacctagccggagcaaagtttcacttatagaagggagaggagcgaacatggcagcgcgttggcggttttggtgtgtctctgtgaccatggtggtggcgctgctcatcgtttgcgacgttccctcagcctctgcccaaagaaagaaggaggtgagaacgcggtttccagcagcatgggcttttcccaatgactggggcttaagagggtctgttcgcctcttcccagccccctttccctgccgcttctatgccttttcctctagagtcgacctgcagccaatgaggaaaggcaaggccgg

SEQ ID NO: 261 - DNA, 43 bp, synthetic construct
  source 1..43: mol_type = other DNA
tccccgggtaccgagctcgaccaatgaggaaaggcaaggccgg

SEQ ID NO: 262 - DNA, 44 bp, synthetic construct
  source 1..44: mol_type = other DNA
ccggccttgcctttcctcattggctgcaggtcgactctagagga

SEQ ID NO: 263 - DNA, 1599 bp, synthetic construct
  source 1..1599: mol_type = other DNA
gaaactgcccttgtcttctctggtcgagctcggtacccggggagagggtctgagccagtcagaaggagatgggccccagagagtaagaaagggggaggaggacccaagctgatccaaaaggtgggtctaagcagtcaagtggaggagggttccaatctgatggcggagggcccaagctcagcctaacgaggaggccaggcccaccaaggggcccctggaggacttgtttcccttgtcccttgtggttttttgcatttcctgttcccttgctgctcattgcggaagttcctcttcttaccctgcacccagagcctcgcgagagaagacaagggcagaaagcaccatgggtgctggtgcaacggggagggctatggatggaccaaggctccttcttcttttgctcttgggcgttagtctgggtggagctaaagaggcatgccccaccggactttacacacattccggtgagtgttgcaaggcctgcaacctgggagaaggcgtcgctcaaccctgcggggcgaatcaaaccgtatgcgaaccttgcctcgattctgttacattctccgatgtcgtctctgcgacggaaccctgcaagccatgcacggaatgtgtcgggttgcaaagtatgtcagctccttgcgttgaagcagacgatgcggtgtgtagatgtgcctatgggtattatcaagacgaaacgacgggacggtgtgaagcatgtcgagtatgcgaggcgggcagtggcctcgtcttctcttgtcaggacaagcaaaacactgtctgtgaagaatgccctgatgggacttatagtgatgaggcgaatcacgtcgatccatgtcttccctgtactgtctgtgaagacactgagagacaattgcgagagtgtacgcgatgggccgacgcagagtgcgaggagatcccaggtcgatggataaccaggtcaacccctcctgagggatctgatagtaccgcgccctccacccaagaacccgaagctccacctgagcaagacctcatagcgtccacagtagcaggagttgtcacaaccgtcatgggaagttcacaaccagtagttaccaggggtaccacggataacctcattccggtgtactgcagcattctcgccgctgtggttgtcggacttgttgcatacattgccttcaaacgctggaatagccgcgccaagcgctcgggttcgggtgccaccaacttcagcctgctgaagcaggccggcgacgtggaggagaaccccggccccagtggtggacctatgggggggagacctgggggccgaggagcaccagcggttcagcagaacataccctccaccctcctccaggaccacgagaaccagcgactctttgagatgcttggacgaaaatgcttggtgagctggggatctcctgcccccgccccgtccccaccgtttcttcctcttcctctcctccttctctctcttcccctcctcccgctcctcctttccctctccatcatctcctctcctagaatttcccgtcataatccacccttcccaggaagatctcaatgtctacttgcctcctctagagtcgacctgcagccagagaagacaagggcagtttc

SEQ ID NO: 264 - DNA, 43 bp, synthetic construct
  source 1..43: mol_type = other DNA
tccccgggtaccgagctcgaccagagaagacaagggcagtttc

SEQ ID NO: 265 - DNA, 44 bp, synthetic construct
  source 1..44: mol_type = other DNA
gaaactgcccttgtcttctctggctgcaggtcgactctagagga

SEQ ID NO: 266 - DNA, 1599 bp, synthetic construct
  source 1..1599: mol_type = other DNA
tactgtgggggcccaatgggaggtcgagctcggtacccggggagagggtctgagccagtcagaaggagatgggccccagagagtaagaaagggggaggaggacccaagctgatccaaaaggtgggtctaagcagtcaagtggaggagggttccaatctgatggcggagggcccaagctcagcctaacgaggaggccaggcccaccaaggggcccctggaggacttgtttcccttgtcccttgtggttttttgcatttcctgttcccttgctgctcattgcggaagttcctcttcttaccctgcacccagagcctcgcgagagaagacaagggcagaaagcaccatgggtgctggtgcaacggggagggctatggatggaccaaggctccttcttcttttgctcttgggcgttagtctgggtggagctaaagaggcatgccccaccggactttacacacattccggtgagtgttgcaaggcctgcaacctgggagaaggcgtcgctcaaccctgcggggcgaatcaaaccgtatgcgaaccttgcctcgattctgttacattctccgatgtcgtctctgcgacggaaccctgcaagccatgcacggaatgtgtcgggttgcaaagtatgtcagctccttgcgttgaagcagacgatgcggtgtgtagatgtgcctatgggtattatcaagacgaaacgacgggacggtgtgaagcatgtcgagtatgcgaggcgggcagtggcctcgtcttctcttgtcaggacaagcaaaacactgtctgtgaagaatgccctgatgggacttatagtgatgaggcgaatcacgtcgatccatgtcttccctgtactgtctgtgaagacactgagagacaattgcgagagtgtacgcgatgggccgacgcagagtgcgaggagatcccaggtcgatggataaccaggtcaacccctcctgagggatctgatagtaccgcgccctccacccaagaacccgaagctccacctgagcaagacctcatagcgtccacagtagcaggagttgtcacaaccgtcatgggaagttcacaaccagtagttaccaggggtaccacggataacctcattccggtgtactgcagcattctcgccgctgtggttgtcggacttgttgcatacattgccttcaaacgctggaatagccgcgccaagcgctcgggttcgggtgccaccaacttcagcctgctgaagcaggccggcgacgtggaggagaaccccggccccagtggtggacctatgggggggagacctgggggccgaggagcaccagcggttcagcagaacataccctccaccctcctccaggaccacgagaaccagcgactctttgagatgcttggacgaaaatgcttggtgagctggggatctcctgcccccgccccgtccccaccgtttcttcctcttcctctcctccttctctctcttcccctcctcccgctcctcctttccctctccatcatctcctctcctagaatttcccgtcataatccacccttcccaggaagatctcaatgtctacttgcctcctctagagtcgacctgcagcctcccattgggcccccacagta

SEQ ID NO: 267 - DNA, 43 bp, synthetic construct
  source 1..43: mol_type = other DNA
tccccgggtaccgagctcgacctcccattgggcccccacagta

SEQ ID NO: 268 - DNA, 44 bp, synthetic construct
  source 1..44: mol_type = other DNA
tactgtgggggcccaatgggaggctgcaggtcgactctagagga

SEQ ID NO: 269 - DNA, 1599 bp, synthetic construct
  source 1..1599: mol_type = other DNA
cctgttcagagtaggacagcaggtcgagctcggtacccggggataatcagtttgccaatgaggaagccccttatcttcaaaaaaggcaagaaagaaagaaagacttcattttcccccttctctttctgttccagttgaagactaggctttggaggttttcaaagcagacggtgcttggatgggcagggagaagtaacattctgcaaatcgccgtcagaggtcctgaggacacagacctacctggcttgcattccccttgctgaatggcgtgtgctgcagctgcccactgagggctcttttccctgggattctggacttcagagtacgacagcacgctgcgaagatgggtgctggtgcaacggggagggctatggatggaccaaggctccttcttcttttgctcttgggcgttagtctgggtggagctaaagaggcatgccccaccggactttacacacattccggtgagtgttgcaaggcctgcaacctgggagaaggcgtcgctcaaccctgcggggcgaatcaaaccgtatgcgaaccttgcctcgattctgttacattctccgatgtcgtctctgcgacggaaccctgcaagccatgcacggaatgtgtcgggttgcaaagtatgtcagctccttgcgttgaagcagacgatgcggtgtgtagatgtgcctatgggtattatcaagacgaaacgacgggacggtgtgaagcatgtcgagtatgcgaggcgggcagtggcctcgtcttctcttgtcaggacaagcaaaacactgtctgtgaagaatgccctgatgggacttatagtgatgaggcgaatcacgtcgatccatgtcttccctgtactgtctgtgaagacactgagagacaattgcgagagtgtacgcgatgggccgacgcagagtgcgaggagatcccaggtcgatggataaccaggtcaacccctcctgagggatctgatagtaccgcgccctccacccaagaacccgaagctccacctgagcaagacctcatagcgtccacagtagcaggagttgtcacaaccgtcatgggaagttcacaaccagtagttaccaggggtaccacggataacctcattccggtgtactgcagcattctcgccgctgtggttgtcggacttgttgcatacattgccttcaaacgctggaatagccgcgccaagcgctcgggttcgggtgccaccaacttcagcctgctgaagcaggccggcgacgtggaggagaaccccggccccctgagttctatcaagtgcgtgttggtgggcgactctgctgtggggaaaacctctctgttggtgcgcttcacctccgagaccttcccggaggcctacaagcccacagtgtacgagaacacaggggtggacgtcttcatggatggcatccagatcagcctgggcctctgggacacagccggcaatgacgccttcagaagcatccggcccctgtcctaccagcaggcagacgtggtgctgatgtgctactctgtggccaaccataactcattcctgaacttgaagaacaagtggattggtgaatcctctagagtcgacctgcagcctgctgtcctactctgaacagg

SEQ ID NO: 270 - DNA, 43 bp, synthetic construct
  source 1..43: mol_type = other DNA
tccccgggtaccgagctcgacctgctgtcctactctgaacagg

SEQ ID NO: 271 - DNA, 44 bp, synthetic construct
  source 1..44: mol_type = other DNA
cctgttcagagtaggacagcaggctgcaggtcgactctagagga

SEQ ID NO: 272 - DNA, 1599 bp, synthetic construct
  source 1..1599: mol_type = other DNA
agtcagtaggacagcaggctgggtcgagctcggtacccggggataatcagtttgccaatgaggaagccccttatcttcaaaaaaggcaagaaagaaagaaagacttcattttcccccttctctttctgttccagttgaagactaggctttggaggttttcaaagcagacggtgcttggatgggcagggagaagtaacattctgcaaatcgccgtcagaggtcctgaggacacagacctacctggcttgcattccccttgctgaatggcgtgtgctgcagctgcccactgagggctcttttccctgggattctggacttcagagtacgacagcacgctgcgaagatgggtgctggtgcaacggggagggctatggatggaccaaggctccttcttcttttgctcttgggcgttagtctgggtggagctaaagaggcatgccccaccggactttacacacattccggtgagtgttgcaaggcctgcaacctgggagaaggcgtcgctcaaccctgcggggcgaatcaaaccgtatgcgaaccttgcctcgattctgttacattctccgatgtcgtctctgcgacggaaccctgcaagccatgcacggaatgtgtcgggttgcaaagtatgtcagctccttgcgttgaagcagacgatgcggtgtgtagatgtgcctatgggtattatcaagacgaaacgacgggacggtgtgaagcatgtcgagtatgcgaggcgggcagtggcctcgtcttctcttgtcaggacaagcaaaacactgtctgtgaagaatgccctgatgggacttatagtgatgaggcgaatcacgtcgatccatgtcttccctgtactgtctgtgaagacactgagagacaattgcgagagtgtacgcgatgggccgacgcagagtgcgaggagatcccaggtcgatggataaccaggtcaacccctcctgagggatctgatagtaccgcgccctccacccaagaacccgaagctccacctgagcaagacctcatagcgtccacagtagcaggagttgtcacaaccgtcatgggaagttcacaaccagtagttaccaggggtaccacggataacctcattccggtgtactgcagcattctcgccgctgtggttgtcggacttgttgcatacattgccttcaaacgctggaatagccgcgccaagcgctcgggttcgggtgccaccaacttcagcctgctgaagcaggccggcgacgtggaggagaaccccggccccctgagttctatcaagtgcgtgttggtgggcgactctgctgtggggaaaacctctctgttggtgcgcttcacctccgagaccttcccggaggcctacaagcccacagtgtacgagaacacaggggtggacgtcttcatggatggcatccagatcagcctgggcctctgggacacagccggcaatgacgccttcagaagcatccggcccctgtcctaccagcaggcagacgtggtgctgatgtgctactctgtggccaaccataactcattcctgaacttgaagaacaagtggattggtgaatcctctagagtcgacctgcagcccagcctgctgtcctactgact

SEQ ID NO: 273 - DNA, 43 bp, synthetic construct
  source 1..43: mol_type = other DNA
tccccgggtaccgagctcgacccagcctgctgtcctactgact

SEQ ID NO: 274 - DNA, 44 bp, synthetic construct
  source 1..44: mol_type = other DNA
agtcagtaggacagcaggctgggctgcaggtcgactctagagga

SEQ ID NO: 275 - DNA, 1599 bp, synthetic construct
  source 1..1599: mol_type = other DNA
tccacctcctcggtgagggacggtcgagctcggtacccggggacgcgcctcgccgtggggcggtgcctgcgcctgagcctctacgagagggaaggaacgctgctccgagctccgcgtcgcgtcgcgtagattcgcgtcgccgtcgacctcagaggcggggccggaagcgctacggtttgacccccgagtccctctgttcccgaaggggcggccgtctttctcccgacccgctccgcctcctctccttcttccccattacccggaggccgaagcccccagccagggcggggcggcgcagcccgagctcccggacccggaagaagcgccatctcccgcctccaccatgggtgctggtgcaacggggagggctatggatggaccaaggctccttcttcttttgctcttgggcgttagtctgggtggagctaaagaggcatgccccaccggactttacacacattccggtgagtgttgcaaggcctgcaacctgggagaaggcgtcgctcaaccctgcggggcgaatcaaaccgtatgcgaaccttgcctcgattctgttacattctccgatgtcgtctctgcgacggaaccctgcaagccatgcacggaatgtgtcgggttgcaaagtatgtcagctccttgcgttgaagcagacgatgcggtgtgtagatgtgcctatgggtattatcaagacgaaacgacgggacggtgtgaagcatgtcgagtatgcgaggcgggcagtggcctcgtcttctcttgtcaggacaagcaaaacactgtctgtgaagaatgccctgatgggacttatagtgatgaggcgaatcacgtcgatccatgtcttccctgtactgtctgtgaagacactgagagacaattgcgagagtgtacgcgatgggccgacgcagagtgcgaggagatcccaggtcgatggataaccaggtcaacccctcctgagggatctgatagtaccgcgccctccacccaagaacccgaagctccacctgagcaagacctcatagcgtccacagtagcaggagttgtcacaaccgtcatgggaagttcacaaccagtagttaccaggggtaccacggataacctcattccggtgtactgcagcattctcgccgctgtggttgtcggacttgttgcatacattgccttcaaacgctggaatagccgcgccaagcgctcgggttcgggtgccaccaacttcagcctgctgaagcaggccggcgacgtggaggagaaccccggccccgagccgaccgcaccgagtctgacggaggaggacctcactgaagtgaagaaggacgtgagtaacgcagctgtgcccagggcgggcgggggcgggctgcagcccagcgggagacgaaagcggaagcctggagtccgaggacaaggaggatcctccaggtcggaggagcggaaagtcctagcacaggaggactgtggcgagccctgcatccgagggaccttggtggcagtgatcctccagtgatctgtcaatccaggttttacatcgctaaacgcagagcttgggctttgttgccaagtggtgtcctctagagtcgacctgcagccgtccctcaccgaggaggtgga

SEQ ID NO: 276 - DNA, 43 bp, synthetic construct
  source 1..43: mol_type = other DNA
tccccgggtaccgagctcgaccgtccctcaccgaggaggtgga

SEQ ID NO: 277 - DNA, 44 bp, synthetic construct
  source 1..44: mol_type = other DNA
tccacctcctcggtgagggacggctgcaggtcgactctagagga

SEQ ID NO: 278 - DNA, 1599 bp, synthetic construct
  source 1..1599: mol_type = other DNA
gagcgtgagggacggtgcggtggtcgagctcggtacccggggacgcgcctcgccgtggggcggtgcctgcgcctgagcctctacgagagggaaggaacgctgctccgagctccgcgtcgcgtcgcgtagattcgcgtcgccgtcgacctcagaggcggggccggaagcgctacggtttgacccccgagtccctctgttcccgaaggggcggccgtctttctcccgacccgctccgcctcctctccttcttccccattacccggaggccgaagcccccagccagggcggggcggcgcagcccgagctcccggacccggaagaagcgccatctcccgcctccaccatgggtgctggtgcaacggggagggctatggatggaccaaggctccttcttcttttgctcttgggcgttagtctgggtggagctaaagaggcatgccccaccggactttacacacattccggtgagtgttgcaaggcctgcaacctgggagaaggcgtcgctcaaccctgcggggcgaatcaaaccgtatgcgaaccttgcctcgattctgttacattctccgatgtcgtctctgcgacggaaccctgcaagccatgcacggaatgtgtcgggttgcaaagtatgtcagctccttgcgttgaagcagacgatgcggtgtgtagatgtgcctatgggtattatcaagacgaaacgacgggacggtgtgaagcatgtcgagtatgcgaggcgggcagtggcctcgtcttctcttgtcaggacaagcaaaacactgtctgtgaagaatgccctgatgggacttatagtgatgaggcgaatcacgtcgatccatgtcttccctgtactgtctgtgaagacactgagagacaattgcgagagtgtacgcgatgggccgacgcagagtgcgaggagatcccaggtcgatggataaccaggtcaacccctcctgagggatctgatagtaccgcgccctccacccaagaacccgaagctccacctgagcaagacctcatagcgtccacagtagcaggagttgtcacaaccgtcatgggaagttcacaaccagtagttaccaggggtaccacggataacctcattccggtgtactgcagcattctcgccgctgtggttgtcggacttgttgcatacattgccttcaaacgctggaatagccgcgccaagcgctcgggttcgggtgccaccaacttcagcctgctgaagcaggccggcgacgtggaggagaaccccggccccgagccgaccgcaccgagtctgacggaggaggacctcactgaagtgaagaaggacgtgagtaacgcagctgtgcccagggcgggcgggggcgggctgcagcccagcgggagacgaaagcggaagcctggagtccgaggacaaggaggatcctccaggtcggaggagcggaaagtcctagcacaggaggactgtggcgagccctgcatccgagggaccttggtggcagtgatcctccagtgatctgtcaatccaggttttacatcgctaaacgcagagcttgggctttgttgccaagtggtgtcctctagagtcgacctgcagccaccgcaccgtccctcacgctc

SEQ ID NO: 279 - DNA, 43 bp, synthetic construct
  source 1..43: mol_type = other DNA
tccccgggtaccgagctcgaccaccgcaccgtccctcacgctc

SEQ ID NO: 280 - DNA, 44 bp, synthetic construct
  source 1..44: mol_type = other DNA
gagcgtgagggacggtgcggtggctgcaggtcgactctagagga

SEQ ID NO: 281 - DNA, 1599 bp, synthetic construct
  source 1..1599: mol_type = other DNA
gaccgcgcgccgcatcgtccgggtcgagctcggtacccggggaggctacccggaccactttgatccgaaggcactggaggcccagagggaaggaaagggaggggtggccggagcccgctagcgccccaggacagcctcgggttgccccaggcggtagccctgtgggacagtggttccccgtccgcggcctcgggggcggggcgtctgtaggcctcgccccgctgacgtcagccctgcggggcgctggcggagcgggcggcggagctgtcagtcccagcccaagggtagctggaggcgcgcaggccggctccgctccggccgcggacgatgcggcgcgcccaggatgggtgctggtgcaacggggagggctatggatggaccaaggctccttcttcttttgctcttgggcgttagtctgggtggagctaaagaggcatgccccaccggactttacacacattccggtgagtgttgcaaggcctgcaacctgggagaaggcgtcgctcaaccctgcggggcgaatcaaaccgtatgcgaaccttgcctcgattctgttacattctccgatgtcgtctctgcgacggaaccctgcaagccatgcacggaatgtgtcgggttgcaaagtatgtcagctccttgcgttgaagcagacgatgcggtgtgtagatgtgcctatgggtattatcaagacgaaacgacgggacggtgtgaagcatgtcgagtatgcgaggcgggcagtggcctcgtcttctcttgtcaggacaagcaaaacactgtctgtgaagaatgccctgatgggacttatagtgatgaggcgaatcacgtcgatccatgtcttccctgtactgtctgtgaagacactgagagacaattgcgagagtgtacgcgatgggccgacgcagagtgcgaggagatcccaggtcgatggataaccaggtcaacccctcctgagggatctgatagtaccgcgccctccacccaagaacccgaagctccacctgagcaagacctcatagcgtccacagtagcaggagttgtcacaaccgtcatgggaagttcacaaccagtagttaccaggggtaccacggataacctcattccggtgtactgcagcattctcgccgctgtggttgtcggacttgttgcatacattgccttcaaacgctggaatagccgcgccaagcgctcgggttcgggtgccaccaacttcagcctgctgaagcaggccggcgacgtggaggagaaccccggccccctgccgtgtctggttgtcctgctcgcggcgctcctcagcctccgtcttggctcagacgctcatggtaaggctccgggacgcggcccttccctgccctgccctctccgcgcccgctccattaaagttctccatccagtggagagccctggctggctggccctctggcagagcggtgcccgggtgctcccttactctggcaaacctggatctcaggctcacctgttgtggaagtggaagaggctgaaattgacaggaactgacggattgggaaggatagagaagtatgcgcaaggccaaacctcctctagagtcgacctgcagcccggacgatgcggcgcgcggtc

SEQ ID NO: 282 - DNA, 43 bp, synthetic construct
  source 1..43: mol_type = other DNA
tccccgggtaccgagctcgacccggacgatgcggcgcgcggtc

SEQ ID NO: 283 - DNA, 44 bp, synthetic construct
  source 1..44: mol_type = other DNA
gaccgcgcgccgcatcgtccgggctgcaggtcgactctagagga

SEQ ID NO: 284 - DNA, 1599 bp, synthetic construct
  source 1..1599: mol_type = other DNA
cggtgcagcactacgaggcacggtcgagctcggtacccggggaggctacccggaccactttgatccgaaggcactggaggcccagagggaaggaaagggaggggtggccggagcccgctagcgccccaggacagcctcgggttgccccaggcggtagccctgtgggacagtggttccccgtccgcggcctcgggggcggggcgtctgtaggcctcgccccgctgacgtcagccctgcggggcgctggcggagcgggcggcggagctgtcagtcccagcccaagggtagctggaggcgcgcaggccggctccgctccggccgcggacgatgcggcgcgcccaggatgggtgctggtgcaacggggagggctatggatggaccaaggctccttcttcttttgctcttgggcgttagtctgggtggagctaaagaggcatgccccaccggactttacacacattccggtgagtgttgcaaggcctgcaacctgggagaaggcgtcgctcaaccctgcggggcgaatcaaaccgtatgcgaaccttgcctcgattctgttacattctccgatgtcgtctctgcgacggaaccctgcaagccatgcacggaatgtgtcgggttgcaaagtatgtcagctccttgcgttgaagcagacgatgcggtgtgtagatgtgcctatgggtattatcaagacgaaacgacgggacggtgtgaagcatgtcgagtatgcgaggcgggcagtggcctcgtcttctcttgtcaggacaagcaaaacactgtctgtgaagaatgccctgatgggacttatagtgatgaggcgaatcacgtcgatccatgtcttccctgtactgtctgtgaagacactgagagacaattgcgagagtgtacgcgatgggccgacgcagagtgcgaggagatcccaggtcgatggataaccaggtcaacccctcctgagggatctgatagtaccgcgccctccacccaagaacccgaagctccacctgagcaagacctcatagcgtccacagtagcaggagttgtcacaaccgtcatgggaagttcacaaccagtagttaccaggggtaccacggataacctcattccggtgtactgcagcattctcgccgctgtggttgtcggacttgttgcatacattgccttcaaacgctggaatagccgcgccaagcgctcgggttcgggtgccaccaacttcagcctgctgaagcaggccggcgacgtggaggagaaccccggccccctgccgtgtctggttgtcctgctcgcggcgctcctcagcctccgtcttggctcagacgctcatggtaaggctccgggacgcggcccttccctgccctgccctctccgcgcccgctccattaaagttctccatccagtggagagccctggctggctggccctctggcagagcggtgcccgggtgctcccttactctggcaaacctggatctcaggctcacctgttgtggaagtggaagaggctgaaattgacaggaactgacggattgggaaggatagagaagtatgcgcaaggccaaacctcctctagagtcgacctgcagccgtgcctcgtagtgctgcaccg

SEQ ID NO: 285 - DNA, 43 bp, synthetic construct
  source 1..43: mol_type = other DNA
tccccgggtaccgagctcgaccgtgcctcgtagtgctgcaccg

SEQ ID NO: 286 - DNA, 44 bp, synthetic construct
  source 1..44: mol_type = other DNA
cggtgcagcactacgaggcacggctgcaggtcgactctagagga

SEQ ID NO: 287 - DNA, 1599 bp, synthetic construct
  source 1..1599: mol_type = other DNA
ggaagcacagttctcctcctcggtcgagctcggtacccggggaaaaatccttcttccaatgttcctcccctctctgtatgaaccctgtgttggggggcagaagatggaagcccttggcaagctcgatcgaaccaagctactaaattgctgagctcgttttaactgaagtgtgagaaggaggtttaaggcaagtagacaacatcctgttgttggggtgcttctctcttttttgcacatctggctgaactgggagtcaggtggttgacttgtgcctggctgcagtagcagcggcatctcccttgcacagttctcctcctccgcgtgcccaagagtccacgacgccatgggtgctggtgcaacggggagggctatggatggaccaaggctccttcttcttttgctcttgggcgttagtctgggtggagctaaagaggcatgccccaccggactttacacacattccggtgagtgttgcaaggcctgcaacctgggagaaggcgtcgctcaaccctgcggggcgaatcaaaccgtatgcgaaccttgcctcgattctgttacattctccgatgtcgtctctgcgacggaaccctgcaagccatgcacggaatgtgtcgggttgcaaagtatgtcagctccttgcgttgaagcagacgatgcggtgtgtagatgtgcctatgggtattatcaagacgaaacgacgggacggtgtgaagcatgtcgagtatgcgaggcgggcagtggcctcgtcttctcttgtcaggacaagcaaaacactgtctgtgaagaatgccctgatgggacttatagtgatgaggcgaatcacgtcgatccatgtcttccctgtactgtctgtgaagacactgagagacaattgcgagagtgtacgcgatgggccgacgcagagtgcgaggagatcccaggtcgatggataaccaggtcaacccctcctgagggatctgatagtaccgcgccctccacccaagaacccgaagctccacctgagcaagacctcatagcgtccacagtagcaggagttgtcacaaccgtcatgggaagttcacaaccagtagttaccaggggtaccacggataacctcattccggtgtactgcagcattctcgccgctgtggttgtcggacttgttgcatacattgccttcaaacgctggaatagccgcgccaagcgctcgggttcgggtgccaccaacttcagcctgctgaagcaggccggcgacgtggaggagaaccccggccccgacgcagtggctgtgtatcatggcaaaatcagcagggaaaccggcgagaagctcctgcttgccactgggctggatggcagctatttgctgagggacagcgagagcgtgccaggcgtgtactgcctatgtgtgctgtgagtatgatacggtggacatgggcctgctgagggtgtgggcggtgggcaacagcagctggggccagggtggaggccgaggcaggcaggggcgccggcgttagcagctcgccgacgcctcctccgtggcccaccctcaagtccagcccagggccgtggtggaacatcctctagagtcgacctgcagccgaggaggagaactgtgcttcc

SEQ ID NO: 288 - DNA, 43 bp, synthetic construct
  source 1..43: mol_type = other DNA
tccccgggtaccgagctcgaccgaggaggagaactgtgcttcc

SEQ ID NO: 289 - DNA, 44 bp, synthetic construct
  source 1..44: mol_type = other DNA
ggaagcacagttctcctcctcggctgcaggtcgactctagagga

SEQ ID NO: 290 - DNA, 1599 bp, synthetic construct
  source 1..1599: mol_type = other DNA
gtcgcactgcgtccatggcctggtcgagctcggtacccggggaaaaatccttcttccaatgttcctcccctctctgtatgaaccctgtgttggggggcagaagatggaagcccttggcaagctcgatcgaaccaagctactaaattgctgagctcgttttaactgaagtgtgagaaggaggtttaaggcaagtagacaacatcctgttgttggggtgcttctctcttttttgcacatctggctgaactgggagtcaggtggttgacttgtgcctggctgcagtagcagcggcatctcccttgcacagttctcctcctccgcgtgcccaagagtccacgacgccatgggtgctggtgcaacggggagggctatggatggaccaaggctccttcttcttttgctcttgggcgttagtctgggtggagctaaagaggcatgccccaccggactttacacacattccggtgagtgttgcaaggcctgcaacctgggagaaggcgtcgctcaaccctgcggggcgaatcaaaccgtatgcgaaccttgcctcgattctgttacattctccgatgtcgtctctgcgacggaaccctgcaagccatgcacggaatgtgtcgggttgcaaagtatgtcagctccttgcgttgaagcagacgatgcggtgtgtagatgtgcctatgggtattatcaagacgaaacgacgggacggtgtgaagcatgtcgagtatgcgaggcgggcagtggcctcgtcttctcttgtcaggacaagcaaaacactgtctgtgaagaatgccctgatgggacttatagtgatgaggcgaatcacgtcgatccatgtcttccctgtactgtctgtgaagacactgagagacaattgcgagagtgtacgcgatgggccgacgcagagtgcgaggagatcccaggtcgatggataaccaggtcaacccctcctgagggatctgatagtaccgcgccctccacccaagaacccgaagctccacctgagcaagacctcatagcgtccacagtagcaggagttgtcacaaccgtcatgggaagttcacaaccagtagttaccaggggtaccacggataacctcattccggtgtactgcagcattctcgccgctgtggttgtcggacttgttgcatacattgccttcaaacgctggaatagccgcgccaagcgctcgggttcgggtgccaccaacttcagcctgctgaagcaggccggcgacgtggaggagaaccccggccccgacgcagtggctgtgtatcatggcaaaatcagcagggaaaccggcgagaagctcctgcttgccactgggctggatggcagctatttgctgagggacagcgagagcgtgccaggcgtgtactgcctatgtgtgctgtgagtatgatacggtggacatgggcctgctgagggtgtgggcggtgggcaacagcagctggggccagggtggaggccgaggcaggcaggggcgccggcgttagcagctcgccgacgcctcctccgtggcccaccctcaagtccagcccagggccgtggtggaacatcctctagagtcgacctgcagccaggccatggacgcagtgcgac

SEQ ID NO: 291 - DNA, 43 bp, synthetic construct
  source 1..43: mol_type = other DNA
tccccgggtaccgagctcgaccaggccatggacgcagtgcgac

SEQ ID NO: 292 - DNA, 44 bp, synthetic construct
  source 1..44: mol_type = other DNA
gtcgcactgcgtccatggcctggctgcaggtcgactctagagga

SEQ ID NO: 293 - DNA, 1599 bp, synthetic construct
  source 1..1599: mol_type = other DNA
aaaataggacaactgtcatctggtcgagctcggtacccggggaatttgctgtgcgtgctcctgtggggaggacatgcagtgtctgcctgggagaagaggcagctgaggccgtggcccggagtagtaggagccacaagccaccctgggcaggacgaggccctgagggaggtgagctttttgtacccgcaggtcgggaactcactcctgagcttcctgctgtccaaggaccccactgttttccagggagtcccttccaaaggtctcacccagctcagctgaggtaactcattttgccatttcttcatttttaggacaactgtcatctcggaagtaacaacgcaggatgggtgctggtgcaacggggagggctatggatggaccaaggctccttcttcttttgctcttgggcgttagtctgggtggagctaaagaggcatgccccaccggactttacacacattccggtgagtgttgcaaggcctgcaacctgggagaaggcgtcgctcaaccctgcggggcgaatcaaaccgtatgcgaaccttgcctcgattctgttacattctccgatgtcgtctctgcgacggaaccctgcaagccatgcacggaatgtgtcgggttgcaaagtatgtcagctccttgcgttgaagcagacgatgcggtgtgtagatgtgcctatgggtattatcaagacgaaacgacgggacggtgtgaagcatgtcgagtatgcgaggcgggcagtggcctcgtcttctcttgtcaggacaagcaaaacactgtctgtgaagaatgccctgatgggacttatagtgatgaggcgaatcacgtcgatccatgtcttccctgtactgtctgtgaagacactgagagacaattgcgagagtgtacgcgatgggccgacgcagagtgcgaggagatcccaggtcgatggataaccaggtcaacccctcctgagggatctgatagtaccgcgccctccacccaagaacccgaagctccacctgagcaagacctcatagcgtccacagtagcaggagttgtcacaaccgtcatgggaagttcacaaccagtagttaccaggggtaccacggataacctcattccggtgtactgcagcattctcgccgctgtggttgtcggacttgttgcatacattgccttcaaacgctggaatagccgcgccaagcgctcgggttcgggtgccaccaacttcagcctgctgaagcaggccggcgacgtggaggagaaccccgggcctccccctggcgtcgattgtcccatggaattctggaccaaggaggagaatcagagcgttgtggttgacttcctgctgcccacaggggtctacctgaacttccctgtgtcccgcaatgccaacctcagcaccatcaagcaggtatggcctccatccggtcctcagaccttggtgctcagagagagtgagagagagagagacacagatagacagacagacagacagacagatggacaggtggacagacggacagacagatggacagatgcactgcttttcagacttgggatcctcagatgagaatcctctagagtcgacctgcagccagatgacagttgtcctatttt

SEQ ID NO: 294 - DNA, 43 bp, synthetic construct
  source 1..43: mol_type = other DNA
tccccgggtaccgagctcgaccagatgacagttgtcctatttt

SEQ ID NO: 295 - DNA, 44 bp, synthetic construct
  source 1..44: mol_type = other DNA
aaaataggacaactgtcatctggctgcaggtcgactctagagga

SEQ ID NO: 296 - DNA, 1599 bp, synthetic construct
  source 1..1599: mol_type = other DNA
attgaacgcaggatgccccctggtcgagctcggtacccggggaatttgctgtgcgtgctcctgtggggaggacatgcagtgtctgcctgggagaagaggcagctgaggccgtggcccggagtagtaggagccacaagccaccctgggcaggacgaggccctgagggaggtgagctttttgtacccgcaggtcgggaactcactcctgagcttcctgctgtccaaggaccccactgttttccagggagtcccttccaaaggtctcacccagctcagctgaggtaactcattttgccatttcttcatttttaggacaactgtcatctcggaagtaacaacgcaggatgggtgctggtgcaacggggagggctatggatggaccaaggctccttcttcttttgctcttgggcgttagtctgggtggagctaaagaggcatgccccaccggactttacacacattccggtgagtgttgcaaggcctgcaacctgggagaaggcgtcgctcaaccctgcggggcgaatcaaaccgtatgcgaaccttgcctcgattctgttacattctccgatgtcgtctctgcgacggaaccctgcaagccatgcacggaatgtgtcgggttgcaaagtatgtcagctccttgcgttgaagcagacgatgcggtgtgtagatgtgcctatgggtattatcaagacgaaacgacgggacggtgtgaagcatgtcgagtatgcgaggcgggcagtggcctcgtcttctcttgtcaggacaagcaaaacactgtctgtgaagaatgccctgatgggacttatagtgatgaggcgaatcacgtcgatccatgtcttccctgtactgtctgtgaagacactgagagacaattgcgagagtgtacgcgatgggccgacgcagagtgcgaggagatcccaggtcgatggataaccaggtcaacccctcctgagggatctgatagtaccgcgccctccacccaagaacccgaagctccacctgagcaagacctcatagcgtccacagtagcaggagttgtcacaaccgtcatgggaagttcacaaccagtagttaccaggggtaccacggataacctcattccggtgtactgcagcattctcgccgctgtggttgtcggacttgttgcatacattgccttcaaacgctggaatagccgcgccaagcgctcgggttcgggtgccaccaacttcagcctgctgaagcaggccggcgacgtggaggagaaccccgggcctccccctggcgtcgattgtcccatggaattctggaccaaggaggagaatcagagcgttgtggttgacttcctgctgcccacaggggtctacctgaacttccctgtgtcccgcaatgccaacctcagcaccatcaagcaggtatggcctccatccggtcctcagaccttggtgctcagagagagtgagagagagagagacacagatagacagacagacagacagacagatggacaggtggacagacggacagacagatggacagatgcactgcttttcagacttgggatcctcagatgagaatcctctagagtcgacctgcagccagggggcatcctgcgttcaat

SEQ ID NO: 297 - DNA, 43 bp, synthetic construct
  source 1..43: mol_type = other DNA
tccccgggtaccgagctcgaccagggggcatcctgcgttcaat

SEQ ID NO: 298 - DNA, 44 bp, synthetic construct
  source 1..44: mol_type = other DNA
attgaacgcaggatgccccctggctgcaggtcgactctagagga

SEQ ID NO: 299 - DNA, 1599 bp, synthetic construct
  source 1..1599: mol_type = other DNA
agcccaaggccacaatgaaccggtcgagctcggtacccggggaccatggggctccttattcacttatttatcttctgtttttgctcacctgcctctttctcttgcttctgctcctactcattccttccttaatccaacctccaattccctctgctattctcctgcctcaagttcactaggctggctgcaagggtcctgagggagaggttgtgtatcgcccctgtatactccaggtccagtaaatgtttgctgactaatgattggcatttccctcaggccctgccatttctgtgggctcaggtccctactggctcaggcccctgcctccgtccgcaaggccacaatgggtgctggtgcaacggggagggctatggatggaccaaggctccttcttcttttgctcttgggcgttagtctgggtggagctaaagaggcatgccccaccggactttacacacattccggtgagtgttgcaaggcctgcaacctgggagaaggcgtcgctcaaccctgcggggcgaatcaaaccgtatgcgaaccttgcctcgattctgttacattctccgatgtcgtctctgcgacggaaccctgcaagccatgcacggaatgtgtcgggttgcaaagtatgtcagctccttgcgttgaagcagacgatgcggtgtgtagatgtgcctatgggtattatcaagacgaaacgacgggacggtgtgaagcatgtcgagtatgcgaggcgggcagtggcctcgtcttctcttgtcaggacaagcaaaacactgtctgtgaagaatgccctgatgggacttatagtgatgaggcgaatcacgtcgatccatgtcttccctgtactgtctgtgaagacactgagagacaattgcgagagtgtacgcgatgggccgacgcagagtgcgaggagatcccaggtcgatggataaccaggtcaacccctcctgagggatctgatagtaccgcgccctccacccaagaacccgaagctccacctgagcaagacctcatagcgtccacagtagcaggagttgtcacaaccgtcatgggaagttcacaaccagtagttaccaggggtaccacggataacctcattccggtgtactgcagcattctcgccgctgtggttgtcggacttgttgcatacattgccttcaaacgctggaatagccgcgccaagcgctcgggttcgggtgccaccaacttcagcctgctgaagcaggccggcgacgtggaggagaaccccggccccaaccgcggagtgccttttaggcacttgcttctggtgctgcaactgggtaagttctcagacctggggtctcaatgcagatgacgtgggaggaaaggcaaaggtggaggatggggtagagggggacagcggcgacattgagacctgactcctttcttttccacttagcgctcctcccagcagccactcagggaaagaaagtggtgctgggcaaaaaaggggatacagtggaactgacctgtacagcttcccagaagaagagcatacaattccactggaaaaactccaaccagataaagattctcctctagagtcgacctgcagccggttcattgtggccttgggct

SEQ ID NO: 300 - DNA, 43 bp, synthetic construct
  source 1..43: mol_type = other DNA
tccccgggtaccgagctcgaccggttcattgtggccttgggct

SEQ ID NO: 301 - DNA, 44 bp, synthetic construct
  source 1..44: mol_type = other DNA
agcccaaggccacaatgaaccggctgcaggtcgactctagagga

SEQ ID NO: 302 - DNA, 1599 bp, synthetic construct
  source 1..1599: mol_type = other DNA
cgagaggcccctgcctccctcggtcgagctcggtacccggggaccatggggctccttattcacttatttatcttctgtttttgctcacctgcctctttctcttgcttctgctcctactcattccttccttaatccaacctccaattccctctgctattctcctgcctcaagttcactaggctggctgcaagggtcctgagggagaggttgtgtatcgcccctgtatactccaggtccagtaaatgtttgctgactaatgattggcatttccctcaggccctgccatttctgtgggctcaggtccctactggctcaggcccctgcctccgtccgcaaggccacaatgggtgctggtgcaacggggagggctatggatggaccaaggctccttcttcttttgctcttgggcgttagtctgggtggagctaaagaggcatgccccaccggactttacacacattccggtgagtgttgcaaggcctgcaacctgggagaaggcgtcgctcaaccctgcggggcgaatcaaaccgtatgcgaaccttgcctcgattctgttacattctccgatgtcgtctctgcgacggaaccctgcaagccatgcacggaatgtgtcgggttgcaaagtatgtcagctccttgcgttgaagcagacgatgcggtgtgtagatgtgcctatgggtattatcaagacgaaacgacgggacggtgtgaagcatgtcgagtatgcgaggcgggcagtggcctcgtcttctcttgtcaggacaagcaaaacactgtctgtgaagaatgccctgatgggacttatagtgatgaggcgaatcacgtcgatccatgtcttccctgtactgtctgtgaagacactgagagacaattgcgagagtgtacgcgatgggccgacgcagagtgcgaggagatcccaggtcgatggataaccaggtcaacccctcctgagggatctgatagtaccgcgccctccacccaagaacccgaagctccacctgagcaagacctcatagcgtccacagtagcaggagttgtcacaaccgtcatgggaagttcacaaccagtagttaccaggggtaccacggataacctcattccggtgtactgcagcattctcgccgctgtggttgtcggacttgttgcatacattgccttcaaacgctggaatagccgcgccaagcgctcgggttcgggtgccaccaacttcagcctgctgaagcaggccggcgacgtggaggagaaccccggccccaaccgcggagtgccttttaggcacttgcttctggtgctgcaactgggtaagttctcagacctggggtctcaatgcagatgacgtgggaggaaaggcaaaggtggaggatggggtagagggggacagcggcgacattgagacctgactcctttcttttccacttagcgctcctcccagcagccactcagggaaagaaagtggtgctgggcaaaaaaggggatacagtggaactgacctgtacagcttcccagaagaagagcatacaattccactggaaaaactccaaccagataaagattctcctctagagtcgacctgcagccgagggaggcaggggcctctcg

SEQ ID NO: 303 - DNA, 43 bp, synthetic construct
  source 1..43: mol_type = other DNA
tccccgggtaccgagctcgaccgagggaggcaggggcctctcg

SEQ ID NO: 304 - DNA, 44 bp, synthetic construct
  source 1..44: mol_type = other DNA
cgagaggcccctgcctccctcggctgcaggtcgactctagagga

SEQ ID NO: 305 - DNA, 1599 bp, synthetic construct
  source 1..1599: mol_type = other DNA
tcgtggtacaaggtggccagcggtcgagctcggtacccggggacatggccttgtcctgtgtgggggtggccgagagcactgccccagccctgggtaccttgggcaggaagctggcagaggccagggctgccattcaaacaggggcaggtggttttgccaggaggaagttgacagttcaacttcaaacatgggtgacgcaggccccacactgcctgctccccgtcccacccctccctgagcacgccaccccgccctctccctctctgagagcgagatacccggccagacaccctcacctgcggtgcccagctgcgcaggctgaggcaagagaacgccagaaaccatgggtgctggtgcaacggggagggctatggatggaccaaggctccttcttcttttgctcttgggcgttagtctgggtggagctaaagaggcatgccccaccggactttacacacattccggtgagtgttgcaaggcctgcaacctgggagaaggcgtcgctcaaccctgcggggcgaatcaaaccgtatgcgaaccttgcctcgattctgttacattctccgatgtcgtctctgcgacggaaccctgcaagccatgcacggaatgtgtcgggttgcaaagtatgtcagctccttgcgttgaagcagacgatgcggtgtgtagatgtgcctatgggtattatcaagacgaaacgacgggacggtgtgaagcatgtcgagtatgcgaggcgggcagtggcctcgtcttctcttgtcaggacaagcaaaacactgtctgtgaagaatgccctgatgggacttatagtgatgaggcgaatcacgtcgatccatgtcttccctgtactgtctgtgaagacactgagagacaattgcgagagtgtacgcgatgggccgacgcagagtgcgaggagatcccaggtcgatggataaccaggtcaacccctcctgagggatctgatagtaccgcgccctccacccaagaacccgaagctccacctgagcaagacctcatagcgtccacagtagcaggagttgtcacaaccgtcatgggaagttcacaaccagtagttaccaggggtaccacggataacctcattccggtgtactgcagcattctcgccgctgtggttgtcggacttgttgcatacattgccttcaaacgctggaatagccgcgccaagcgctcgggttcgggtgccaccaacttcagcctgctgaagcaggccggcgacgtggaggagaaccccggcccccccatggggtctctgcaaccgctcgcgacgttatacctgctggggatgctgggtgagtacccctcccaggtgtcctgcgaacacccgggctcgctccagtgcaaggaaggagttcccagttttacccaaggctgactctgggatccacatgtcagccctctggagcgttgtggagatttggggccactgggatccctgcctgcccccactaagccgcagcttggccctctgtcctgcatgtcccacccgccaggagcacaaccttgcctctctcatgcgctgttgagaaccctgctttactcctctagagtcgacctgcagccgctggccaccttgtaccacga

SEQ ID NO: 306 - DNA, 43 bp, synthetic construct
  source 1..43: mol_type = other DNA
tccccgggtaccgagctcgaccgctggccaccttgtaccacga

SEQ ID NO: 307 - DNA, 44 bp, synthetic construct
  source 1..44: mol_type = other DNA
tcgtggtacaaggtggccagcggctgcaggtcgactctagagga

SEQ ID NO: 308 - DNA, 1599 bp, synthetic construct
  source 1..1599: mol_type = other DNA
gtacgggtctctgcaaccgctggtcgagctcggtacccggggacatggccttgtcctgtgtgggggtggccgagagcactgccccagccctgggtaccttgggcaggaagctggcagaggccagggctgccattcaaacaggggcaggtggttttgccaggaggaagttgacagttcaacttcaaacatgggtgacgcaggccccacactgcctgctccccgtcccacccctccctgagcacgccaccccgccctctccctctctgagagcgagatacccggccagacaccctcacctgcggtgcccagctgcgcaggctgaggcaagagaacgccagaaaccatgggtgctggtgcaacggggagggctatggatggaccaaggctccttcttcttttgctcttgggcgttagtctgggtggagctaaagaggcatgccccaccggactttacacacattccggtgagtgttgcaaggcctgcaacctgggagaaggcgtcgctcaaccctgcggggcgaatcaaaccgtatgcgaaccttgcctcgattctgttacattctccgatgtcgtctctgcgacggaaccctgcaagccatgcacggaatgtgtcgggttgcaaagtatgtcagctccttgcgttgaagcagacgatgcggtgtgtagatgtgcctatgggtattatcaagacgaaacgacgggacggtgtgaagcatgtcgagtatgcgaggcgggcagtggcctcgtcttctcttgtcaggacaagcaaaacactgtctgtgaagaatgccctgatgggacttatagtgatgaggcgaatcacgtcgatccatgtcttccctgtactgtctgtgaagacactgagagacaattgcgagagtgtacgcgatgggccgacgcagagtgcgaggagatcccaggtcgatggataaccaggtcaacccctcctgagggatctgatagtaccgcgccctccacccaagaacccgaagctccacctgagcaagacctcatagcgtccacagtagcaggagttgtcacaaccgtcatgggaagttcacaaccagtagttaccaggggtaccacggataacctcattccggtgtactgcagcattctcgccgctgtggttgtcggacttgttgcatacattgccttcaaacgctggaatagccgcgccaagcgctcgggttcgggtgccaccaacttcagcctgctgaagcaggccggcgacgtggaggagaaccccggcccccccatggggtctctgcaaccgctcgcgacgttatacctgctggggatgctgggtgagtacccctcccaggtgtcctgcgaacacccgggctcgctccagtgcaaggaaggagttcccagttttacccaaggctgactctgggatccacatgtcagccctctggagcgttgtggagatttggggccactgggatccctgcctgcccccactaagccgcagcttggccctctgtcctgcatgtcccacccgccaggagcacaaccttgcctctctcatgcgctgttgagaaccctgctttactcctctagagtcgacctgcagccagcggttgcagagacccgtac

SEQ ID NO: 309 - DNA, 43 bp, synthetic construct
  source 1..43: mol_type = other DNA
tccccgggtaccgagctcgaccagcggttgcagagacccgtac

SEQ ID NO: 310 - DNA, 44 bp, synthetic construct
  source 1..44: mol_type = other DNA
gtacgggtctctgcaaccgctggctgcaggtcgactctagagga

SEQ ID NO: 311 - DNA, 1599 bp, synthetic construct
  source 1..1599: mol_type = other DNA
aaccgacccctgattttagcaggtcgagctcggtacccggggatgttggcttatgcctgtaatctcagcactttgggaggccaaggtgggaggatcacttgagtccaggagttcaaggccaccctgggcaacaggcaaaaaatagagaccccatctctattttttaaaaataaaataaactgggagaaagaagcagggtcctccccagagcatctttatccctagtcacagacctgacacctgtgttgggcaatggctacttctagattgtttacccctactgggacttgtggtgaacatatgcacactttggtttacagttcggacccgtgaatttggcacgatgggtgctggtgcaacggggagggctatggatggaccaaggctccttcttcttttgctcttgggcgttagtctgggtggagctaaagaggcatgccccaccggactttacacacattccggtgagtgttgcaaggcctgcaacctgggagaaggcgtcgctcaaccctgcggggcgaatcaaaccgtatgcgaaccttgcctcgattctgttacattctccgatgtcgtctctgcgacggaaccctgcaagccatgcacggaatgtgtcgggttgcaaagtatgtcagctccttgcgttgaagcagacgatgcggtgtgtagatgtgcctatgggtattatcaagacgaaacgacgggacggtgtgaagcatgtcgagtatgcgaggcgggcagtggcctcgtcttctcttgtcaggacaagcaaaacactgtctgtgaagaatgccctgatgggacttatagtgatgaggcgaatcacgtcgatccatgtcttccctgtactgtctgtgaagacactgagagacaattgcgagagtgtacgcgatgggccgacgcagagtgcgaggagatcccaggtcgatggataaccaggtcaacccctcctgagggatctgatagtaccgcgccctccacccaagaacccgaagctccacctgagcaagacctcatagcgtccacagtagcaggagttgtcacaaccgtcatgggaagttcacaaccagtagttaccaggggtaccacggataacctcattccggtgtactgcagcattctcgccgctgtggttgtcggacttgttgcatacattgccttcaaacgctggaatagccgcgccaagcgctcgggttcgggtgccaccaacttcagcctgctgaagcaggccggcgacgtggaggagaaccccggccccgctcaatggaatcagctacagcagcttgacacacggtacctggagcagctccatcagctctacagtgacagcttcccaatggagctgcggcagtttctggccccttggattgagagtcaagattggtaagtccttcttaagtgactctccaaattgttaggtttcagtttgagtcaagagacatgaactcttaatgtcatgccttgctgttccattaaaaaatgtatgggtacaggtgatggggaaaatgagatcaggagataaaggggcaccctttggtcttgtaaagccttttttatctcctctagagtcgacctgcagcctgctaaaatcaggggtcggtt

SEQ ID NO: 312 - DNA, 43 bp, synthetic construct
  source 1..43: mol_type = other DNA
tccccgggtaccgagctcgacctgctaaaatcaggggtcggtt

SEQ ID NO: 313 - DNA, 44 bp, synthetic construct
  source 1..44: mol_type = other DNA
aaccgacccctgattttagcaggctgcaggtcgactctagagga

SEQ ID NO: 314 - DNA, 1599 bp, synthetic construct
  source 1..1599: mol_type = other DNA
cgacctgtagctgattccattggtcgagctcggtacccggggatgttggcttatgcctgtaatctcagcactttgggaggccaaggtgggaggatcacttgagtccaggagttcaaggccaccctgggcaacaggcaaaaaatagagaccccatctctattttttaaaaataaaataaactgggagaaagaagcagggtcctccccagagcatctttatccctagtcacagacctgacacctgtgttgggcaatggctacttctagattgtttacccctactgggacttgtggtgaacatatgcacactttggtttacagttcggacccgtgaatttggcacgatgggtgctggtgcaacggggagggctatggatggaccaaggctccttcttcttttgctcttgggcgttagtctgggtggagctaaagaggcatgccccaccggactttacacacattccggtgagtgttgcaaggcctgcaacctgggagaaggcgtcgctcaaccctgcggggcgaatcaaaccgtatgcgaaccttgcctcgattctgttacattctccgatgtcgtctctgcgacggaaccctgcaagccatgcacggaatgtgtcgggttgcaaagtatgtcagctccttgcgttgaagcagacgatgcggtgtgtagatgtgcctatgggtattatcaagacgaaacgacgggacggtgtgaagcatgtcgagtatgcgaggcgggcagtggcctcgtcttctcttgtcaggacaagcaaaacactgtctgtgaagaatgccctgatgggacttatagtgatgaggcgaatcacgtcgatccatgtcttccctgtactgtctgtgaagacactgagagacaattgcgagagtgtacgcgatgggccgacgcagagtgcgaggagatcccaggtcgatggataaccaggtcaacccctcctgagggatctgatagtaccgcgccctccacccaagaacccgaagctccacctgagcaagacctcatagcgtccacagtagcaggagttgtcacaaccgtcatgggaagttcacaaccagtagttaccaggggtaccacggataacctcattccggtgtactgcagcattctcgccgctgtggttgtcggacttgttgcatacattgccttcaaacgctggaatagccgcgccaagcgctcgggttcgggtgccaccaacttcagcctgctgaagcaggccggcgacgtggaggagaaccccggccccgctcaatggaatcagctacagcagcttgacacacggtacctggagcagctccatcagctctacagtgacagcttcccaatggagctgcggcagtttctggccccttggattgagagtcaagattggtaagtccttcttaagtgactctccaaattgttaggtttcagtttgagtcaagagacatgaactcttaatgtcatgccttgctgttccattaaaaaatgtatgggtacaggtgatggggaaaatgagatcaggagataaaggggcaccctttggtcttgtaaagccttttttatctcctctagagtcgacctgcagccaatggaatcagctacaggtcg

SEQ ID NO: 315 - DNA, 43 bp, synthetic construct
  source 1..43: mol_type = other DNA
tccccgggtaccgagctcgaccaatggaatcagctacaggtcg

SEQ ID NO: 316 - DNA, 44 bp, synthetic construct
  source 1..44: mol_type = other DNA
cgacctgtagctgattccattggctgcaggtcgactctagagga

SEQ ID NO: 317 - DNA, 1599 bp, synthetic construct
  source 1..1599: mol_type = other DNA
acgagccgtagaagaagggcaggtcgagctcggtacccggggatgggtacaggtgtgggtgcttggggaccagttggcgtgcttgggcgtccacataatgtctctggaaagtcagatgggggtttgggacttctcgatctgtgcccagcaggctgcggcttctctccaggttgactctggcacagagcaggctctgcccccttggcgagctcagtctgcggcactgatgccctccacttggcgtctctcgcgccgtctttgggcccaacgcaccaggttcaggaaggccctgacgtgcctccgaccctctgtgaacccgcaggtttcgcgaggcccaggggcgatgggtgctggtgcaacggggagggctatggatggaccaaggctccttcttcttttgctcttgggcgttagtctgggtggagctaaagaggcatgccccaccggactttacacacattccggtgagtgttgcaaggcctgcaacctgggagaaggcgtcgctcaaccctgcggggcgaatcaaaccgtatgcgaaccttgcctcgattctgttacattctccgatgtcgtctctgcgacggaaccctgcaagccatgcacggaatgtgtcgggttgcaaagtatgtcagctccttgcgttgaagcagacgatgcggtgtgtagatgtgcctatgggtattatcaagacgaaacgacgggacggtgtgaagcatgtcgagtatgcgaggcgggcagtggcctcgtcttctcttgtcaggacaagcaaaacactgtctgtgaagaatgccctgatgggacttatagtgatgaggcgaatcacgtcgatccatgtcttccctgtactgtctgtgaagacactgagagacaattgcgagagtgtacgcgatgggccgacgcagagtgcgaggagatcccaggtcgatggataaccaggtcaacccctcctgagggatctgatagtaccgcgccctccacccaagaacccgaagctccacctgagcaagacctcatagcgtccacagtagcaggagttgtcacaaccgtcatgggaagttcacaaccagtagttaccaggggtaccacggataacctcattccggtgtactgcagcattctcgccgctgtggttgtcggacttgttgcatacattgccttcaaacgctggaatagccgcgccaagcgctcgggttcgggtgccaccaacttcagcctgctgaagcaggccggcgacgtggaggagaaccccggccccccagaccccgccgcccatctgccctttttttatgggagcatctcgcgtgccgaggccgaggagcacctgaagctggcgggcatggcggacgggctcttcctgctgcgccagtgcctgcgctcgctgggcggctatgtgctgtcgctcgtgcacgatgtgcgcttccaccactttcccatcgagcgccagctcaacggcacctacgccattgccggcggcaaagcgcactgtggaccggcagagctctgcgagttctactcgcgcgaccccgacgggctgccctgcaacctgcgcaagccgtcctctagagtcgacctgcagcctgcccttcttctacggctcgt

SEQ ID NO: 318 - DNA, 43 bp, synthetic construct
  source 1..43: mol_type = other DNA
tccccgggtaccgagctcgacctgcccttcttctacggctcgt

SEQ ID NO: 319 - DNA, 44 bp, synthetic construct
  source 1..44: mol_type = other DNA
acgagccgtagaagaagggcaggctgcaggtcgactctagagga

SEQ ID NO: 320 - DNA, 1599 bp, synthetic construct
  source 1..1599: mol_type = other DNA
ctcttgctgccgtagaagaagggtcgagctcggtacccggggatgggtacaggtgtgggtgcttggggaccagttggcgtgcttgggcgtccacataatgtctctggaaagtcagatgggggtttgggacttctcgatctgtgcccagcaggctgcggcttctctccaggttgactctggcacagagcaggctctgcccccttggcgagctcagtctgcggcactgatgccctccacttggcgtctctcgcgccgtctttgggcccaacgcaccaggttcaggaaggccctgacgtgcctccgaccctctgtgaacccgcaggtttcgcgaggcccaggggcgatgggtgctggtgcaacggggagggctatggatggaccaaggctccttcttcttttgctcttgggcgttagtctgggtggagctaaagaggcatgccccaccggactttacacacattccggtgagtgttgcaaggcctgcaacctgggagaaggcgtcgctcaaccctgcggggcgaatcaaaccgtatgcgaaccttgcctcgattctgttacattctccgatgtcgtctctgcgacggaaccctgcaagccatgcacggaatgtgtcgggttgcaaagtatgtcagctccttgcgttgaagcagacgatgcggtgtgtagatgtgcctatgggtattatcaagacgaaacgacgggacggtgtgaagcatgtcgagtatgcgaggcgggcagtggcctcgtcttctcttgtcaggacaagcaaaacactgtctgtgaagaatgccctgatgggacttatagtgatgaggcgaatcacgtcgatccatgtcttccctgtactgtctgtgaagacactgagagacaattgcgagagtgtacgcgatgggccgacgcagagtgcgaggagatcccaggtcgatggataaccaggtcaacccctcctgagggatctgatagtaccgcgccctccacccaagaacccgaagctccacctgagcaagacctcatagcgtccacagtagcaggagttgtcacaaccgtcatgggaagttcacaaccagtagttaccaggggtaccacggataacctcattccggtgtactgcagcattctcgccgctgtggttgtcggacttgttgcatacattgccttcaaacgctggaatagccgcgccaagcgctcgggttcgggtgccaccaacttcagcctgctgaagcaggccggcgacgtggaggagaaccccggccccccagaccccgccgcccatctgccctttttttatgggagcatctcgcgtgccgaggccgaggagcacctgaagctggcgggcatggcggacgggctcttcctgctgcgccagtgcctgcgctcgctgggcggctatgtgctgtcgctcgtgcacgatgtgcgcttccaccactttcccatcgagcgccagctcaacggcacctacgccattgccggcggcaaagcgcactgtggaccggcagagctctgcgagttctactcgcgcgaccccgacgggctgccctgcaacctgcgcaagccgtcctctagagtcgacctgcagcccttcttctacggcagcaagag

SEQ ID NO: 321 - DNA, 43 bp, synthetic construct
  source 1..43: mol_type = other DNA
tccccgggtaccgagctcgacccttcttctacggcagcaagag

SEQ ID NO: 322 - DNA, 44 bp, synthetic construct
  source 1..44: mol_type = other DNA
ctcttgctgccgtagaagaagggctgcaggtcgactctagagga

SEQ ID NO: 323 - DNA, 1599 bp, synthetic construct
  source 1..1599: mol_type = other DNA
ttggaggctcaactgttgcatggtcgagctcggtacccggggagtgagagtcagcctggattcaaagtgttgacaagttgctgaaaaggaagccagtgagaggactgtggcacgcagaggaagtggagccctgtcttcggtcacaccattgatggaggacagatggacagccgtatggccagtcacctctcctcttaaacctttggagagtggtcctttgtcctctgctggacacataataggaattctaacacattctctgaattcacttttcataaaaacgtaaaatcagactgctctgtacaaccaggctcaactgttgcatcgtagcagatttgcaaacatgggtgctggtgcaacggggagggctatggatggaccaaggctccttcttcttttgctcttgggcgttagtctgggtggagctaaagaggcatgccccaccggactttacacacattccggtgagtgttgcaaggcctgcaacctgggagaaggcgtcgctcaaccctgcggggcgaatcaaaccgtatgcgaaccttgcctcgattctgttacattctccgatgtcgtctctgcgacggaaccctgcaagccatgcacggaatgtgtcgggttgcaaagtatgtcagctccttgcgttgaagcagacgatgcggtgtgtagatgtgcctatgggtattatcaagacgaaacgacgggacggtgtgaagcatgtcgagtatgcgaggcgggcagtggcctcgtcttctcttgtcaggacaagcaaaacactgtctgtgaagaatgccctgatgggacttatagtgatgaggcgaatcacgtcgatccatgtcttccctgtactgtctgtgaagacactgagagacaattgcgagagtgtacgcgatgggccgacgcagagtgcgaggagatcccaggtcgatggataaccaggtcaacccctcctgagggatctgatagtaccgcgccctccacccaagaacccgaagctccacctgagcaagacctcatagcgtccacagtagcaggagttgtcacaaccgtcatgggaagttcacaaccagtagttaccaggggtaccacggataacctcattccggtgtactgcagcattctcgccgctgtggttgtcggacttgttgcatacattgccttcaaacgctggaatagccgcgccaagcgctcgggttcgggtgccaccaacttcagcctgctgaagcaggccggcgacgtggaggagaaccccggccccagtgctgaggggtaccagtacagagcgctgtatgattataaaaaggaaagagaagaagatattgacttgcacttgggtgacatattgactgtgaataaagggtccttagtagctcttggattcagtgatggacaggaagccaggcctgaagaaattggctggttaaatggctataatgaaaccacaggggaaaggggggactttccgggaacttacgtagaatatattggaaggaaaaaaatctcgcctcccacaccaaagccccggccacctcggcctcttcctgttgcaccaggttcttcctctagagtcgacctgcagccatgcaacagttgagcctccaa

SEQ ID NO: 324 - DNA, 43 bp, synthetic construct
  source 1..43: mol_type = other DNA
tccccgggtaccgagctcgaccatgcaacagttgagcctccaa

SEQ ID NO: 325 - DNA, 44 bp, synthetic construct
  source 1..44: mol_type = other DNA
ttggaggctcaactgttgcatggctgcaggtcgactctagagga

SEQ ID NO: 326 - DNA, 1599 bp, synthetic construct
  source 1..1599: mol_type = other DNA
taaagcaaacatgagtgctgaggtcgagctcggtacccggggagtgagagtcagcctggattcaaagtgttgacaagttgctgaaaaggaagccagtgagaggactgtggcacgcagaggaagtggagccctgtcttcggtcacaccattgatggaggacagatggacagccgtatggccagtcacctctcctcttaaacctttggagagtggtcctttgtcctctgctggacacataataggaattctaacacattctctgaattcacttttcataaaaacgtaaaatcagactgctctgtacaaccaggctcaactgttgcatcgtagcagatttgcaaacatgggtgctggtgcaacggggagggctatggatggaccaaggctccttcttcttttgctcttgggcgttagtctgggtggagctaaagaggcatgccccaccggactttacacacattccggtgagtgttgcaaggcctgcaacctgggagaaggcgtcgctcaaccctgcggggcgaatcaaaccgtatgcgaaccttgcctcgattctgttacattctccgatgtcgtctctgcgacggaaccctgcaagccatgcacggaatgtgtcgggttgcaaagtatgtcagctccttgcgttgaagcagacgatgcggtgtgtagatgtgcctatgggtattatcaagacgaaacgacgggacggtgtgaagcatgtcgagtatgcgaggcgggcagtggcctcgtcttctcttgtcaggacaagcaaaacactgtctgtgaagaatgccctgatgggacttatagtgatgaggcgaatcacgtcgatccatgtcttccctgtactgtctgtgaagacactgagagacaattgcgagagtgtacgcgatgggccgacgcagagtgcgaggagatcccaggtcgatggataaccaggtcaacccctcctgagggatctgatagtaccgcgccctccacccaagaacccgaagctccacctgagcaagacctcatagcgtccacagtagcaggagttgtcacaaccgtcatgggaagttcacaaccagtagttaccaggggtaccacggataacctcattccggtgtactgcagcattctcgccgctgtggttgtcggacttgttgcatacattgccttcaaacgctggaatagccgcgccaagcgctcgggttcgggtgccaccaacttcagcctgctgaagcaggccggcgacgtggaggagaaccccggccccagtgctgaggggtaccagtacagagcgctgtatgattataaaaaggaaagagaagaagatattgacttgcacttgggtgacatattgactgtgaataaagggtccttagtagctcttggattcagtgatggacaggaagccaggcctgaagaaattggctggttaaatggctataatgaaaccacaggggaaaggggggactttccgggaacttacgtagaatatattggaaggaaaaaaatctcgcctcccacaccaaagccccggccacctcggcctcttcctgttgcaccaggttcttcctctagagtcgacctgcagcctcagcactcatgtttgcttta

SEQ ID NO: 327 - DNA, 43 bp, synthetic construct
  source 1..43: mol_type = other DNA
tccccgggtaccgagctcgacctcagcactcatgtttgcttta

SEQ ID NO: 328 - DNA, 44 bp, synthetic construct
  source 1..44: mol_type = other DNA
taaagcaaacatgagtgctgaggctgcaggtcgactctagagga

SEQ ID NO: 329 - DNA, 1599 bp, synthetic construct
  source 1..1599: mol_type = other DNA
tgcgatacatccatgactctaggtcgagctcggtacccggggagagctgacagcagccccgcagccaccctgcccgaagtctccggaagcggcacgagctcaggccgccgcagccccggcggacccactgttggacctgaggagccagccctcctcccgcacccaaacttggagcacttgacctttggctgttggagggggcaggctcgcgggtggctggacagctgcggagccgcgagggcatcttgcctggagaccgtcggctgcactcccgggctcctggctttgcctctgggatcccgaggtgtcgacatcagacgcatgttgactgagacctagagtcatgggtgctggtgcaacggggagggctatggatggaccaaggctccttcttcttttgctcttgggcgttagtctgggtggagctaaagaggcatgccccaccggactttacacacattccggtgagtgttgcaaggcctgcaacctgggagaaggcgtcgctcaaccctgcggggcgaatcaaaccgtatgcgaaccttgcctcgattctgttacattctccgatgtcgtctctgcgacggaaccctgcaagccatgcacggaatgtgtcgggttgcaaagtatgtcagctccttgcgttgaagcagacgatgcggtgtgtagatgtgcctatgggtattatcaagacgaaacgacgggacggtgtgaagcatgtcgagtatgcgaggcgggcagtggcctcgtcttctcttgtcaggacaagcaaaacactgtctgtgaagaatgccctgatgggacttatagtgatgaggcgaatcacgtcgatccatgtcttccctgtactgtctgtgaagacactgagagacaattgcgagagtgtacgcgatgggccgacgcagagtgcgaggagatcccaggtcgatggataaccaggtcaacccctcctgagggatctgatagtaccgcgccctccacccaagaacccgaagctccacctgagcaagacctcatagcgtccacagtagcaggagttgtcacaaccgtcatgggaagttcacaaccagtagttaccaggggtaccacggataacctcattccggtgtactgcagcattctcgccgctgtggttgtcggacttgttgcatacattgccttcaaacgctggaatagccgcgccaagcgctcgggttcgggtgccaccaacttcagcctgctgaagcaggccggcgacgtggaggagaaccccggccccgatgtatgcgtgcgtcttgctctgtggctcctctggggactcctcctgcaccagggccagagcctcagccatagtcacagtgagaaggcgacaggaaccagctcgggggccaactctgaggagtccactgcagcaggtaaggccttgctgcgggctggactgggctggaggctttggctcaggactgagtggcccgaagtgggcaagttgaaatctaggtttgtacatgtgaggttcatggaggattcacacatggcactgcctgttccaagtagttcaagaagttctttctggtcagtatcctctagagtcgacctgcagcctagagtcatggatgtatcgca

SEQ ID NO: 330 - DNA, 43 bp, synthetic construct
  source 1..43: mol_type = other DNA
tccccgggtaccgagctcgacctagagtcatggatgtatcgca

SEQ ID NO: 331 - DNA, 44 bp, synthetic construct
  source 1..44: mol_type = other DNA
tgcgatacatccatgactctaggctgcaggtcgactctagagga

SEQ ID NO: 332 - DNA, 1599 bp, synthetic construct
  source 1..1599: mol_type = other DNA
gtcacaacatgcgtctgatgtggtcgagctcggtacccggggagagctgacagcagccccgcagccaccctgcccgaagtctccggaagcggcacgagctcaggccgccgcagccccggcggacccactgttggacctgaggagccagccctcctcccgcacccaaacttggagcacttgacctttggctgttggagggggcaggctcgcgggtggctggacagctgcggagccgcgagggcatcttgcctggagaccgtcggctgcactcccgggctcctggctttgcctctgggatcccgaggtgtcgacatcagacgcatgttgactgagacctagagtcatgggtgctggtgcaacggggagggctatggatggaccaaggctccttcttcttttgctcttgggcgttagtctgggtggagctaaagaggcatgccccaccggactttacacacattccggtgagtgttgcaaggcctgcaacctgggagaaggcgtcgctcaaccctgcggggcgaatcaaaccgtatgcgaaccttgcctcgattctgttacattctccgatgtcgtctctgcgacggaaccctgcaagccatgcacggaatgtgtcgggttgcaaagtatgtcagctccttgcgttgaagcagacgatgcggtgtgtagatgtgcctatgggtattatcaagacgaaacgacgggacggtgtgaagcatgtcgagtatgcgaggcgggcagtggcctcgtcttctcttgtcaggacaagcaaaacactgtctgtgaagaatgccctgatgggacttatagtgatgaggcgaatcacgtcgatccatgtcttccctgtactgtctgtgaagacactgagagacaattgcgagagtgtacgcgatgggccgacgcagagtgcgaggagatcccaggtcgatggataaccaggtcaacccctcctgagggatctgatagtaccgcgccctccacccaagaacccgaagctccacctgagcaagacctcatagcgtccacagtagcaggagttgtcacaaccgtcatgggaagttcacaaccagtagttaccaggggtaccacggataacctcattccggtgtactgcagcattctcgccgctgtggttgtcggacttgttgcatacattgccttcaaacgctggaatagccgcgccaagcgctcgggttcgggtgccaccaacttcagcctgctgaagcaggccggcgacgtggaggagaaccccggccccgatgtatgcgtgcgtcttgctctgtggctcctctggggactcctcctgcaccagggccagagcctcagccatagtcacagtgagaaggcgacaggaaccagctcgggggccaactctgaggagtccactgcagcaggtaaggccttgctgcgggctggactgggctggaggctttggctcaggactgagtggcccgaagtgggcaagttgaaatctaggtttgtacatgtgaggttcatggaggattcacacatggcactgcctgttccaagtagttcaagaagttctttctggtcagtatcctctagagtcgacctgcagccacatcagacgcatgttgtgac

SEQ ID NO: 333 - DNA, 43 bp, synthetic construct
  source 1..43: mol_type = other DNA
tccccgggtaccgagctcgaccacatcagacgcatgttgtgac

SEQ ID NO: 334 - DNA, 44 bp, synthetic construct
  source 1..44: mol_type = other DNA
gtcacaacatgcgtctgatgtggctgcaggtcgactctagagga

SEQ ID NO: 335 - DNA, 1599 bp, synthetic construct
  source 1..1599: mol_type = other DNA
gtgtaatacatggtcatatctggtcgagctcggtacccggggagaacaacttttttgacttcctgcaaagaggacccttacagtatttttggagaagttagtaaaaccgaatctgacatcatcacctagcagttcatgcagctagcaagtggtttgttcttagggtaacagaggaggaaattgttcctcgtctgataagacaacagtggagagtatgcatttattgatttacttttacattgttgattcgtttttacagagaaaaacttctacagagataacaattattttgcttttcagaaggacgcatgctgtttcttagggacaccgctgacttccagatatgggtgctggtgcaacggggagggctatggatggaccaaggctccttcttcttttgctcttgggcgttagtctgggtggagctaaagaggcatgccccaccggactttacacacattccggtgagtgttgcaaggcctgcaacctgggagaaggcgtcgctcaaccctgcggggcgaatcaaaccgtatgcgaaccttgcctcgattctgttacattctccgatgtcgtctctgcgacggaaccctgcaagccatgcacggaatgtgtcgggttgcaaagtatgtcagctccttgcgttgaagcagacgatgcggtgtgtagatgtgcctatgggtattatcaagacgaaacgacgggacggtgtgaagcatgtcgagtatgcgaggcgggcagtggcctcgtcttctcttgtcaggacaagcaaaacactgtctgtgaagaatgccctgatgggacttatagtgatgaggcgaatcacgtcgatccatgtcttccctgtactgtctgtgaagacactgagagacaattgcgagagtgtacgcgatgggccgacgcagagtgcgaggagatcccaggtcgatggataaccaggtcaacccctcctgagggatctgatagtaccgcgccctccacccaagaacccgaagctccacctgagcaagacctcatagcgtccacagtagcaggagttgtcacaaccgtcatgggaagttcacaaccagtagttaccaggggtaccacggataacctcattccggtgtactgcagcattctcgccgctgtggttgtcggacttgttgcatacattgccttcaaacgctggaatagccgcgccaagcgctcgggttcgggtgccaccaacttcagcctgctgaagcaggccggcgacgtggaggagaaccccggccccacgatgtatttgtggcttaaactcttagcatttggctttgcctttctggacacagaagtatttgtgacaggtaagtacaaggatattaatattttttaaattatcttgtctctgctggaggaatgtttgaaatagacataaaaataatttaaatgtgttggtaactggaagtgagaagcctgctgtaaaccatcaagattgttgtctcagggagacatagctagttgtgtgacagaatacattgtttctgtttacaaagacataaatgtttcgggacaaaaaatacaattttaaaaggaatcctctagagtcgacctgcagccagatatgaccatgtattacac

SEQ ID NO: 336 - DNA, 43 bp, synthetic construct
  source 1..43: mol_type = other DNA
tccccgggtaccgagctcgaccagatatgaccatgtattacac

SEQ ID NO: 337 - DNA, 44 bp, synthetic construct
  source 1..44: mol_type = other DNA
gtgtaatacatggtcatatctggctgcaggtcgactctagagga

SEQ ID NO: 338 - DNA, 1599 bp, synthetic construct
  source 1..1599: mol_type = other DNA
catattgtggcttaaactcttggtcgagctcggtacccggggagaacaacttttttgacttcctgcaaagaggacccttacagtatttttggagaagttagtaaaaccgaatctgacatcatcacctagcagttcatgcagctagcaagtggtttgttcttagggtaacagaggaggaaattgttcctcgtctgataagacaacagtggagagtatgcatttattgatttacttttacattgttgattcgtttttacagagaaaaacttctacagagataacaattattttgcttttcagaaggacgcatgctgtttcttagggacaccgctgacttccagatatgggtgctggtgcaacggggagggctatggatggaccaaggctccttcttcttttgctcttgggcgttagtctgggtggagctaaagaggcatgccccaccggactttacacacattccggtgagtgttgcaaggcctgcaacctgggagaaggcgtcgctcaaccctgcggggcgaatcaaaccgtatgcgaaccttgcctcgattctgttacattctccgatgtcgtctctgcgacggaaccctgcaagccatgcacggaatgtgtcgggttgcaaagtatgtcagctccttgcgttgaagcagacgatgcggtgtgtagatgtgcctatgggtattatcaagacgaaacgacgggacggtgtgaagcatgtcgagtatgcgaggcgggcagtggcctcgtcttctcttgtcaggacaagcaaaacactgtctgtgaagaatgccctgatgggacttatagtgatgaggcgaatcacgtcgatccatgtcttccctgtactgtctgtgaagacactgagagacaattgcgagagtgtacgcgatgggccgacgcagagtgcgaggagatcccaggtcgatggataaccaggtcaacccctcctgagggatctgatagtaccgcgccctccacccaagaacccgaagctccacctgagcaagacctcatagcgtccacagtagcaggagttgtcacaaccgtcatgggaagttcacaaccagtagttaccaggggtaccacggataacctcattccggtgtactgcagcattctcgccgctgtggttgtcggacttgttgcatacattgccttcaaacgctggaatagccgcgccaagcgctcgggttcgggtgccaccaacttcagcctgctgaagcaggccggcgacgtggaggagaaccccggccccacgatgtatttgtggcttaaactcttagcatttggctttgcctttctggacacagaagtatttgtgacaggtaagtacaaggatattaatattttttaaattatcttgtctctgctggaggaatgtttgaaatagacataaaaataatttaaatgtgttggtaactggaagtgagaagcctgctgtaaaccatcaagattgttgtctcagggagacatagctagttgtgtgacagaatacattgtttctgtttacaaagacataaatgtttcgggacaaaaaatacaattttaaaaggaatcctctagagtcgacctgcagccaagagtttaagccacaatatg

SEQ ID NO: 339 - DNA, 43 bp, synthetic construct
  source 1..43: mol_type = other DNA
tccccgggtaccgagctcgaccaagagtttaagccacaatatg

SEQ ID NO: 340 - DNA, 44 bp, synthetic construct
  source 1..44: mol_type = other DNA
catattgtggcttaaactcttggctgcaggtcgactctagagga

SEQ ID NO: 341 - DNA, 1599 bp, synthetic construct
  source 1..1599: mol_type = other DNA
cttgatagcacgtttctctctggtcgagctcggtacccggggaaatgtggttgcattgtcaatagggacgctaaagttcaggccaccttttccatattctctgccagctccctgctcagagatagagcaatttacaccgcttccttcctaccctacccctagcccacccccactctgaaaatttcccaccatcaacggcagaaagcagagaagcagacatcttctagttcctcccccactctcctctttccggtacctgtgagtcagctaggggagggcagctctcacccaggctgatagttcggtgacctggctttatctactggatgagtaccggtcgaagatgggtgctggtgcaacggggagggctatggatggaccaaggctccttcttcttttgctcttgggcgttagtctgggtggagctaaagaggcatgccccaccggactttacacacattccggtgagtgttgcaaggcctgcaacctgggagaaggcgtcgctcaaccctgcggggcgaatcaaaccgtatgcgaaccttgcctcgattctgttacattctccgatgtcgtctctgcgacggaaccctgcaagccatgcacggaatgtgtcgggttgcaaagtatgtcagctccttgcgttgaagcagacgatgcggtgtgtagatgtgcctatgggtattatcaagacgaaacgacgggacggtgtgaagcatgtcgagtatgcgaggcgggcagtggcctcgtcttctcttgtcaggacaagcaaaacactgtctgtgaagaatgccctgatgggacttatagtgatgaggcgaatcacgtcgatccatgtcttccctgtactgtctgtgaagacactgagagacaattgcgagagtgtacgcgatgggccgacgcagagtgcgaggagatcccaggtcgatggataaccaggtcaacccctcctgagggatctgatagtaccgcgccctccacccaagaacccgaagctccacctgagcaagacctcatagcgtccacagtagcaggagttgtcacaaccgtcatgggaagttcacaaccagtagttaccaggggtaccacggataacctcattccggtgtactgcagcattctcgccgctgtggttgtcggacttgttgcatacattgccttcaaacgctggaatagccgcgccaagcgctcgggttcgggtgccaccaacttcagcctgctgaagcaggccggcgacgtggaggagaaccccggccccgaacatagtaccttcctatctggcctcgtactggctacccttctctcgcaaggtaaggctactccaggtgggtgggggaagggacctgagagggacattactgatgggagtgaggcccacttgaaagtgtttcttgccaggcacggtggctcacaccagtaatcccagagctttgggaggccgaagtgggaggatcctttgaggccaggagtttgagaccagtctgagcaacatgatgagactctatctttacaaaaaacaaaagaattagccaggcatggtggtgcacaactgtagtcctcctctagagtcgacctgcagccagagagaaacgtgctatcaag

SEQ ID NO: 342 - DNA, 43 bp, synthetic construct
  source 1..43: mol_type = other DNA
tccccgggtaccgagctcgaccagagagaaacgtgctatcaag

SEQ ID NO: 343 - DNA, 44 bp, synthetic construct
  source 1..44: mol_type = other DNA
cttgatagcacgtttctctctggctgcaggtcgactctagagga

SEQ ID NO: 344 - DNA, 1599 bp, synthetic construct
  source 1..1599: mol_type = other DNA
cctagagttccgctgggagatggtcgagctcggtacccggggaaatgtggttgcattgtcaatagggacgctaaagttcaggccaccttttccatattctctgccagctccctgctcagagatagagcaatttacaccgcttccttcctaccctacccctagcccacccccactctgaaaatttcccaccatcaacggcagaaagcagagaagcagacatcttctagttcctcccccactctcctctttccggtacctgtgagtcagctaggggagggcagctctcacccaggctgatagttcggtgacctggctttatctactggatgagtaccggtcgaagatgggtgctggtgcaacggggagggctatggatggaccaaggctccttcttcttttgctcttgggcgttagtctgggtggagctaaagaggcatgccccaccggactttacacacattccggtgagtgttgcaaggcctgcaacctgggagaaggcgtcgctcaaccctgcggggcgaatcaaaccgtatgcgaaccttgcctcgattctgttacattctccgatgtcgtctctgcgacggaaccctgcaagccatgcacggaatgtgtcgggttgcaaagtatgtcagctccttgcgttgaagcagacgatgcggtgtgtagatgtgcctatgggtattatcaagacgaaacgacgggacggtgtgaagcatgtcgagtatgcgaggcgggcagtggcctcgtcttctcttgtcaggacaagcaaaacactgtctgtgaagaatgccctgatgggacttatagtgatgaggcgaatcacgtcgatccatgtcttccctgtactgtctgtgaagacactgagagacaattgcgagagtgtacgcgatgggccgacgcagagtgcgaggagatcccaggtcgatggataaccaggtcaacccctcctgagggatctgatagtaccgcgccctccacccaagaacccgaagctccacctgagcaagacctcatagcgtccacagtagcaggagttgtcacaaccgtcatgggaagttcacaaccagtagttaccaggggtaccacggataacctcattccggtgtactgcagcattctcgccgctgtggttgtcggacttgttgcatacattgccttcaaacgctggaatagccgcgccaagcgctcgggttcgggtgccaccaacttcagcctgctgaagcaggccggcgacgtggaggagaaccccggccccgaacatagtaccttcctatctggcctcgtactggctacccttctctcgcaaggtaaggctactccaggtgggtgggggaagggacctgagagggacattactgatgggagtgaggcccacttgaaagtgtttcttgccaggcacggtggctcacaccagtaatcccagagctttgggaggccgaagtgggaggatcctttgaggccaggagtttgagaccagtctgagcaacatgatgagactctatctttacaaaaaacaaaagaattagccaggcatggtggtgcacaactgtagtcctcctctagagtcgacctgcagccatctcccagcggaactctagg

SEQ ID NO: 345 - DNA, 43 bp, synthetic construct
  source 1..43: mol_type = other DNA
tccccgggtaccgagctcgaccatctcccagcggaactctagg

SEQ ID NO: 346 - DNA, 44 bp, synthetic construct
  source 1..44: mol_type = other DNA
cctagagttccgctgggagatggctgcaggtcgactctagagga

SEQ ID NO: 347 - DNA, 1599 bp, synthetic construct
  source 1..1599: mol_type = other DNA
tgtaggaaagctcatcttaggggtcgagctcggtacccggggagttccttttctctttcactgagatgagaaaacctatccttcccaatttttttgtgtgagaattaaaatgcagcaagaaaacacacactcataaacacatctgctttggcaaaggagcacatcagaagggctggcttgtgcgcgctcttgctctctgtgtatgtgtattatgttttatgttactgtaaaagatgtaaagagaggcacgtggttaagctctcggggtgtggactccaccagtctcacttcagttccttttgcatgaagagctcagaatcaaaagacgaaacgaacgcctaagatgggtgctggtgcaacggggagggctatggatggaccaaggctccttcttcttttgctcttgggcgttagtctgggtggagctaaagaggcatgccccaccggactttacacacattccggtgagtgttgcaaggcctgcaacctgggagaaggcgtcgctcaaccctgcggggcgaatcaaaccgtatgcgaaccttgcctcgattctgttacattctccgatgtcgtctctgcgacggaaccctgcaagccatgcacggaatgtgtcgggttgcaaagtatgtcagctccttgcgttgaagcagacgatgcggtgtgtagatgtgcctatgggtattatcaagacgaaacgacgggacggtgtgaagcatgtcgagtatgcgaggcgggcagtggcctcgtcttctcttgtcaggacaagcaaaacactgtctgtgaagaatgccctgatgggacttatagtgatgaggcgaatcacgtcgatccatgtcttccctgtactgtctgtgaagacactgagagacaattgcgagagtgtacgcgatgggccgacgcagagtgcgaggagatcccaggtcgatggataaccaggtcaacccctcctgagggatctgatagtaccgcgccctccacccaagaacccgaagctccacctgagcaagacctcatagcgtccacagtagcaggagttgtcacaaccgtcatgggaagttcacaaccagtagttaccaggggtaccacggataacctcattccggtgtactgcagcattctcgccgctgtggttgtcggacttgttgcatacattgccttcaaacgctggaatagccgcgccaagcgctcgggttcgggtgccaccaacttcagcctgctgaagcaggccggcgacgtggaggagaaccccggccccagctttccatgtaaatttgtagccagcttccttctgattttcaatgtttcttccaaaggtaagcataagagtcaaagaagtcccaacccagctttccctgaaagtgactctcagtaactcttttgctttttataggtgcagtctccaaagagattacgaatgccttggaaacctggggtgccttgggtcaggacatcaacttggacattcctagttttcaaatgagtgatgatattgacgatataaaatgggaaaaaacttcagacaagaaaaagattgcacaattcagaaaagagaaagtcctctagagtcgacctgcagcccctaagatgagctttcctaca

SEQ ID NO: 348 - DNA, 43 bp, synthetic construct
  source 1..43: mol_type = other DNA
tccccgggtaccgagctcgacccctaagatgagctttcctaca

SEQ ID NO: 349 - DNA, 44 bp, synthetic construct
  source 1..44: mol_type = other DNA
tgtaggaaagctcatcttaggggctgcaggtcgactctagagga

SEQ ID NO: 350 - DNA, 1599 bp, synthetic construct
  source 1..1599: mol_type = other DNA
atgttggaaagctcatcttagggtcgagctcggtacccggggagttccttttctctttcactgagatgagaaaacctatccttcccaatttttttgtgtgagaattaaaatgcagcaagaaaacacacactcataaacacatctgctttggcaaaggagcacatcagaagggctggcttgtgcgcgctcttgctctctgtgtatgtgtattatgttttatgttactgtaaaagatgtaaagagaggcacgtggttaagctctcggggtgtggactccaccagtctcacttcagttccttttgcatgaagagctcagaatcaaaagacgaaacgaacgcctaagatgggtgctggtgcaacggggagggctatggatggaccaaggctccttcttcttttgctcttgggcgttagtctgggtggagctaaagaggcatgccccaccggactttacacacattccggtgagtgttgcaaggcctgcaacctgggagaaggcgtcgctcaaccctgcggggcgaatcaaaccgtatgcgaaccttgcctcgattctgttacattctccgatgtcgtctctgcgacggaaccctgcaagccatgcacggaatgtgtcgggttgcaaagtatgtcagctccttgcgttgaagcagacgatgcggtgtgtagatgtgcctatgggtattatcaagacgaaacgacgggacggtgtgaagcatgtcgagtatgcgaggcgggcagtggcctcgtcttctcttgtcaggacaagcaaaacactgtctgtgaagaatgccctgatgggacttatagtgatgaggcgaatcacgtcgatccatgtcttccctgtactgtctgtgaagacactgagagacaattgcgagagtgtacgcgatgggccgacgcagagtgcgaggagatcccaggtcgatggataaccaggtcaacccctcctgagggatctgatagtaccgcgccctccacccaagaacccgaagctccacctgagcaagacctcatagcgtccacagtagcaggagttgtcacaaccgtcatgggaagttcacaaccagtagttaccaggggtaccacggataacctcattccggtgtactgcagcattctcgccgctgtggttgtcggacttgttgcatacattgccttcaaacgctggaatagccgcgccaagcgctcgggttcgggtgccaccaacttcagcctgctgaagcaggccggcgacgtggaggagaaccccggccccagctttccatgtaaatttgtagccagcttccttctgattttcaatgtttcttccaaaggtaagcataagagtcaaagaagtcccaacccagctttccctgaaagtgactctcagtaactcttttgctttttataggtgcagtctccaaagagattacgaatgccttggaaacctggggtgccttgggtcaggacatcaacttggacattcctagttttcaaatgagtgatgatattgacgatataaaatgggaaaaaacttcagacaagaaaaagattgcacaattcagaaaagagaaagtcctctagagtcgacctgcagccctaagatgagctttccaacat

SEQ ID NO: 351 - DNA, 43 bp, synthetic construct
  source 1..43: mol_type = other DNA
tccccgggtaccgagctcgaccctaagatgagctttccaacat

SEQ ID NO: 352 - DNA, 44 bp, synthetic construct
  source 1..44: mol_type = other DNA
atgttggaaagctcatcttagggctgcaggtcgactctagagga

SEQ ID NO: 353 - DNA, 1599 bp, synthetic construct
  source 1..1599: mol_type = other DNA
ggtagtcagtctctgtcctccggtcgagctcggtacccggggaccattgcggttccctgtgcaagatgagtctctgagtgggaatccagcactctctccctcttcttccccaccaccttcaccctccttaacggaaaaacaaaaggcatctgcacctgcagccctgctgaggcccctgctgctcacacttgcagcagagggtggaggctctgggttcttgccttctctcaaaggccccagccccaacagtgatgggtggagccagtctagctgctgcacaggctggctggctggctggctgctaagggctgctccacgcttttgcgggaggacacagcctaacatgggtgctggtgcaacggggagggctatggatggaccaaggctccttcttcttttgctcttgggcgttagtctgggtggagctaaagaggcatgccccaccggactttacacacattccggtgagtgttgcaaggcctgcaacctgggagaaggcgtcgctcaaccctgcggggcgaatcaaaccgtatgcgaaccttgcctcgattctgttacattctccgatgtcgtctctgcgacggaaccctgcaagccatgcacggaatgtgtcgggttgcaaagtatgtcagctccttgcgttgaagcagacgatgcggtgtgtagatgtgcctatgggtattatcaagacgaaacgacgggacggtgtgaagcatgtcgagtatgcgaggcgggcagtggcctcgtcttctcttgtcaggacaagcaaaacactgtctgtgaagaatgccctgatgggacttatagtgatgaggcgaatcacgtcgatccatgtcttccctgtactgtctgtgaagacactgagagacaattgcgagagtgtacgcgatgggccgacgcagagtgcgaggagatcccaggtcgatggataaccaggtcaacccctcctgagggatctgatagtaccgcgccctccacccaagaacccgaagctccacctgagcaagacctcatagcgtccacagtagcaggagttgtcacaaccgtcatgggaagttcacaaccagtagttaccaggggtaccacggataacctcattccggtgtactgcagcattctcgccgctgtggttgtcggacttgttgcatacattgccttcaaacgctggaatagccgcgccaagcgctcgggttcgggtgccaccaacttcagcctgctgaagcaggccggcgacgtggaggagaaccccggccccgaacaggggaaaggcctcgctgtcctcatcctggctatcattcttcttcaaggtaagggcctactaggggtctggaagcctggggaagggctcaagggaagagcccatcactagtgagacaggaatattggtatccctaaccttcagcctacctctgctgtcaccttagagttcaaagaagggcaaaatggaggctcttaactgttctctgctagagagaaacagtgtcccatggaggagaaggaatccttgtctctgaaaaatgcaaacagagtacttaaatggctgaagagaggaccctcctctagagtcgacctgcagccggaggacagagactgactacc

SEQ ID NO: 354 - DNA, 43 bp, synthetic construct
  source 1..43: mol_type = other DNA
tccccgggtaccgagctcgaccggaggacagagactgactacc

SEQ ID NO: 355 - DNA, 44 bp, synthetic construct
  source 1..44: mol_type = other DNA
ggtagtcagtctctgtcctccggctgcaggtcgactctagagga

SEQ ID NO: 356 - DNA, 1599 bp, synthetic construct
  source 1..1599: mol_type = other DNA
ggccaggacagagactgacatggtcgagctcggtacccggggaccattgcggttccctgtgcaagatgagtctctgagtgggaatccagcactctctccctcttcttccccaccaccttcaccctccttaacggaaaaacaaaaggcatctgcacctgcagccctgctgaggcccctgctgctcacacttgcagcagagggtggaggctctgggttcttgccttctctcaaaggccccagccccaacagtgatgggtggagccagtctagctgctgcacaggctggctggctggctggctgctaagggctgctccacgcttttgcgggaggacacagcctaacatgggtgctggtgcaacggggagggctatggatggaccaaggctccttcttcttttgctcttgggcgttagtctgggtggagctaaagaggcatgccccaccggactttacacacattccggtgagtgttgcaaggcctgcaacctgggagaaggcgtcgctcaaccctgcggggcgaatcaaaccgtatgcgaaccttgcctcgattctgttacattctccgatgtcgtctctgcgacggaaccctgcaagccatgcacggaatgtgtcgggttgcaaagtatgtcagctccttgcgttgaagcagacgatgcggtgtgtagatgtgcctatgggtattatcaagacgaaacgacgggacggtgtgaagcatgtcgagtatgcgaggcgggcagtggcctcgtcttctcttgtcaggacaagcaaaacactgtctgtgaagaatgccctgatgggacttatagtgatgaggcgaatcacgtcgatccatgtcttccctgtactgtctgtgaagacactgagagacaattgcgagagtgtacgcgatgggccgacgcagagtgcgaggagatcccaggtcgatggataaccaggtcaacccctcctgagggatctgatagtaccgcgccctccacccaagaacccgaagctccacctgagcaagacctcatagcgtccacagtagcaggagttgtcacaaccgtcatgggaagttcacaaccagtagttaccaggggtaccacggataacctcattccggtgtactgcagcattctcgccgctgtggttgtcggacttgttgcatacattgccttcaaacgctggaatagccgcgccaagcgctcgggttcgggtgccaccaacttcagcctgctgaagcaggccggcgacgtggaggagaaccccggccccgaacaggggaaaggcctcgctgtcctcatcctggctatcattcttcttcaaggtaagggcctactaggggtctggaagcctggggaagggctcaagggaagagcccatcactagtgagacaggaatattggtatccctaaccttcagcctacctctgctgtcaccttagagttcaaagaagggcaaaatggaggctcttaactgttctctgctagagagaaacagtgtcccatggaggagaaggaatccttgtctctgaaaaatgcaaacagagtacttaaatggctgaagagaggaccctcctctagagtcgacctgcagccatgtcagtctctgtcctggcc

SEQ ID NO: 357 - DNA, 43 bp, synthetic construct
  source 1..43: mol_type = other DNA
tccccgggtaccgagctcgaccatgtcagtctctgtcctggcc

SEQ ID NO: 358 - DNA, 44 bp, synthetic construct
  source 1..44: mol_type = other DNA
ggccaggacagagactgacatggctgcaggtcgactctagagga

SEQ ID NO: 359 - DNA, 1599 bp, synthetic construct
  source 1..1599: mol_type = other DNA
tcccaaaggacaagatgaagtggtcgagctcggtacccggggatttaaaaaaaggagcattaaaacaatggtcaaatgagagaaaaagcaaaattcagacagacagatacatacacacaccccaaaccctcaaacctccagggcttcctgcctgtgaaccgaaagggggagtgcgaatttcttggccctgtcggcaggtgctttctcaaaggccccacagtcctccacttcctggggaggtagctgcagaataaaaccagcagagactccttttctcctaaccgtcccggccaccgctgcctcagcctctgcgtcccagcgtctttctgagcgaaaggacaagatgggtgctggtgcaacggggagggctatggatggaccaaggctccttcttcttttgctcttgggcgttagtctgggtggagctaaagaggcatgccccaccggactttacacacattccggtgagtgttgcaaggcctgcaacctgggagaaggcgtcgctcaaccctgcggggcgaatcaaaccgtatgcgaaccttgcctcgattctgttacattctccgatgtcgtctctgcgacggaaccctgcaagccatgcacggaatgtgtcgggttgcaaagtatgtcagctccttgcgttgaagcagacgatgcggtgtgtagatgtgcctatgggtattatcaagacgaaacgacgggacggtgtgaagcatgtcgagtatgcgaggcgggcagtggcctcgtcttctcttgtcaggacaagcaaaacactgtctgtgaagaatgccctgatgggacttatagtgatgaggcgaatcacgtcgatccatgtcttccctgtactgtctgtgaagacactgagagacaattgcgagagtgtacgcgatgggccgacgcagagtgcgaggagatcccaggtcgatggataaccaggtcaacccctcctgagggatctgatagtaccgcgccctccacccaagaacccgaagctccacctgagcaagacctcatagcgtccacagtagcaggagttgtcacaaccgtcatgggaagttcacaaccagtagttaccaggggtaccacggataacctcattccggtgtactgcagcattctcgccgctgtggttgtcggacttgttgcatacattgccttcaaacgctggaatagccgcgccaagcgctcgggttcgggtgccaccaacttcagcctgctgaagcaggccggcgacgtggaggagaaccccggccccaagtggaaggcgcttttcaccgcggccatcctgcaggcacagttgccgattacaggtagggccgacgtgtcgacggcagggaacttctagaaactctttgtgtatgtgtaggggagtgggtgtgggtagtggagggtggtgaggggctggggtctccttcaaatcctgccctcctcaaatcaatgggcaagtgagcagtgaggggtccggcccggtgctggcatctgctccgtcacagccgagttgggcatcagttcagagccagctgctagaatacacagctcctccaggtacagattttcctctagagtcgacctgcagccacttcatcttgtcctttggga

SEQ ID NO: 360 - DNA, 43 bp, synthetic construct
  source 1..43: mol_type = other DNA
tccccgggtaccgagctcgaccacttcatcttgtcctttggga

SEQ ID NO: 361 - DNA, 44 bp, synthetic construct
  source 1..44: mol_type = other DNA
tcccaaaggacaagatgaagtggctgcaggtcgactctagagga

SEQ ID NO: 362 - DNA, 1599 bp, synthetic construct
  source 1..1599: mol_type = other DNA
cggacccagcctctttctgagggtcgagctcggtacccggggatttaaaaaaaggagcattaaaacaatggtcaaatgagagaaaaagcaaaattcagacagacagatacatacacacaccccaaaccctcaaacctccagggcttcctgcctgtgaaccgaaagggggagtgcgaatttcttggccctgtcggcaggtgctttctcaaaggccccacagtcctccacttcctggggaggtagctgcagaataaaaccagcagagactccttttctcctaaccgtcccggccaccgctgcctcagcctctgcgtcccagcgtctttctgagcgaaaggacaagatgggtgctggtgcaacggggagggctatggatggaccaaggctccttcttcttttgctcttgggcgttagtctgggtggagctaaagaggcatgccccaccggactttacacacattccggtgagtgttgcaaggcctgcaacctgggagaaggcgtcgctcaaccctgcggggcgaatcaaaccgtatgcgaaccttgcctcgattctgttacattctccgatgtcgtctctgcgacggaaccctgcaagccatgcacggaatgtgtcgggttgcaaagtatgtcagctccttgcgttgaagcagacgatgcggtgtgtagatgtgcctatgggtattatcaagacgaaacgacgggacggtgtgaagcatgtcgagtatgcgaggcgggcagtggcctcgtcttctcttgtcaggacaagcaaaacactgtctgtgaagaatgccctgatgggacttatagtgatgaggcgaatcacgtcgatccatgtcttccctgtactgtctgtgaagacactgagagacaattgcgagagtgtacgcgatgggccgacgcagagtgcgaggagatcccaggtcgatggataaccaggtcaacccctcctgagggatctgatagtaccgcgccctccacccaagaacccgaagctccacctgagcaagacctcatagcgtccacagtagcaggagttgtcacaaccgtcatgggaagttcacaaccagtagttaccaggggtaccacggataacctcattccggtgtactgcagcattctcgccgctgtggttgtcggacttgttgcatacattgccttcaaacgctggaatagccgcgccaagcgctcgggttcgggtgccaccaacttcagcctgctgaagcaggccggcgacgtggaggagaaccccggccccaagtggaaggcgcttttcaccgcggccatcctgcaggcacagttgccgattacaggtagggccgacgtgtcgacggcagggaacttctagaaactctttgtgtatgtgtaggggagtgggtgtgggtagtggagggtggtgaggggctggggtctccttcaaatcctgccctcctcaaatcaatgggcaagtgagcagtgaggggtccggcccggtgctggcatctgctccgtcacagccgagttgggcatcagttcagagccagctgctagaatacacagctcctccaggtacagattttcctctagagtcgacctgcagccctcagaaagaggctgggtccg

SEQ ID NO: 363 - DNA, 43 bp, synthetic construct
  source 1..43: mol_type = other DNA
tccccgggtaccgagctcgaccctcagaaagaggctgggtccg

SEQ ID NO: 364 - DNA, 44 bp, synthetic construct
  source 1..44: mol_type = other DNA
cggacccagcctctttctgagggctgcaggtcgactctagagga

SEQ ID NO: 365 - DNA, 1599 bp, synthetic construct
  source 1..1599: mol_type = other DNA
tctagcagtcgggcactcactggtcgagctcggtacccggggaaggcctctgccttgaacgtttccaagtgaggtaaaacccgcaggcccagaggcctctctacttcctgtgtggggttcagaaaccctcctcccctcccagcctcaggtgcctgcttcagaaaatggtgagtctctctcttataaagccctcctttttcatcctagcattgggaacaatggccccagggtccttatctctagcagatgttttgaaaaagtcatctgttttgctttttttccagaagtagtaagtctgctggcctccgccatcttagtaaagtaacagtcgcatgaaacaaagatgggtgctggtgcaacggggagggctatggatggaccaaggctccttcttcttttgctcttgggcgttagtctgggtggagctaaagaggcatgccccaccggactttacacacattccggtgagtgttgcaaggcctgcaacctgggagaaggcgtcgctcaaccctgcggggcgaatcaaaccgtatgcgaaccttgcctcgattctgttacattctccgatgtcgtctctgcgacggaaccctgcaagccatgcacggaatgtgtcgggttgcaaagtatgtcagctccttgcgttgaagcagacgatgcggtgtgtagatgtgcctatgggtattatcaagacgaaacgacgggacggtgtgaagcatgtcgagtatgcgaggcgggcagtggcctcgtcttctcttgtcaggacaagcaaaacactgtctgtgaagaatgccctgatgggacttatagtgatgaggcgaatcacgtcgatccatgtcttccctgtactgtctgtgaagacactgagagacaattgcgagagtgtacgcgatgggccgacgcagagtgcgaggagatcccaggtcgatggataaccaggtcaacccctcctgagggatctgatagtaccgcgccctccacccaagaacccgaagctccacctgagcaagacctcatagcgtccacagtagcaggagttgtcacaaccgtcatgggaagttcacaaccagtagttaccaggggtaccacggataacctcattccggtgtactgcagcattctcgccgctgtggttgtcggacttgttgcatacattgccttcaaacgctggaatagccgcgccaagcgctcgggttcgggtgccaccaacttcagcctgctgaagcaggccggcgacgtggaggagaaccccggcccccagtccgggacacattggagggtattgggcctctgcctcttatcaggtgagtaggatggagtggaaagggtggtgtgtctccagaccgctggaaggcttacagccttacctggcactgcctagtggcaccaaggagcctcatttaccagatgtaaggaactgtttgtgctatgttagggtgagggattagagctggggactaaagaaaaagataggccacgggtgcctgggagagcgttcggggagcaggcaaagaagagcagttggggtgatcatagctattgtgagcagagaggtctctcctctagagtcgacctgcagccagtgagtgcccgactgctaga

SEQ ID NO: 366 - DNA, 43 bp, synthetic construct
  source 1..43: mol_type = other DNA
tccccgggtaccgagctcgaccagtgagtgcccgactgctaga

SEQ ID NO: 367 - DNA, 44 bp, synthetic construct
  source 1..44: mol_type = other DNA
tctagcagtcgggcactcactggctgcaggtcgactctagagga

SEQ ID NO: 368 - DNA, 1599 bp, synthetic construct
  source 1..1599: mol_type = other DNA
ggtagaaacaaagatgcagtcggtcgagctcggtacccggggaaggcctctgccttgaacgtttccaagtgaggtaaaacccgcaggcccagaggcctctctacttcctgtgtggggttcagaaaccctcctcccctcccagcctcaggtgcctgcttcagaaaatggtgagtctctctcttataaagccctcctttttcatcctagcattgggaacaatggccccagggtccttatctctagcagatgttttgaaaaagtcatctgttttgctttttttccagaagtagtaagtctgctggcctccgccatcttagtaaagtaacagtcgcatgaaacaaagatgggtgctggtgcaacggggagggctatggatggaccaaggctccttcttcttttgctcttgggcgttagtctgggtggagctaaagaggcatgccccaccggactttacacacattccggtgagtgttgcaaggcctgcaacctgggagaaggcgtcgctcaaccctgcggggcgaatcaaaccgtatgcgaaccttgcctcgattctgttacattctccgatgtcgtctctgcgacggaaccctgcaagccatgcacggaatgtgtcgggttgcaaagtatgtcagctccttgcgttgaagcagacgatgcggtgtgtagatgtgcctatgggtattatcaagacgaaacgacgggacggtgtgaagcatgtcgagtatgcgaggcgggcagtggcctcgtcttctcttgtcaggacaagcaaaacactgtctgtgaagaatgccctgatgggacttatagtgatgaggcgaatcacgtcgatccatgtcttccctgtactgtctgtgaagacactgagagacaattgcgagagtgtacgcgatgggccgacgcagagtgcgaggagatcccaggtcgatggataaccaggtcaacccctcctgagggatctgatagtaccgcgccctccacccaagaacccgaagctccacctgagcaagacctcatagcgtccacagtagcaggagttgtcacaaccgtcatgggaagttcacaaccagtagttaccaggggtaccacggataacctcattccggtgtactgcagcattctcgccgctgtggttgtcggacttgttgcatacattgccttcaaacgctggaatagccgcgccaagcgctcgggttcgggtgccaccaacttcagcctgctgaagcaggccggcgacgtggaggagaaccccggcccccagtccgggacacattggagggtattgggcctctgcctcttatcaggtgagtaggatggagtggaaagggtggtgtgtctccagaccgctggaaggcttacagccttacctggcactgcctagtggcaccaaggagcctcatttaccagatgtaaggaactgtttgtgctatgttagggtgagggattagagctggggactaaagaaaaagataggccacgggtgcctgggagagcgttcggggagcaggcaaagaagagcagttggggtgatcatagctattgtgagcagagaggtctctcctctagagtcgacctgcagccgactgcatctttgtttctacc

SEQ ID NO: 369 - DNA, 43 bp, synthetic construct
  source 1..43: mol_type = other DNA
tccccgggtaccgagctcgaccgactgcatctttgtttctacc

SEQ ID NO: 370 - DNA, 44 bp, synthetic construct
  source 1..44: mol_type = other DNA
ggtagaaacaaagatgcagtcggctgcaggtcgactctagagga

SEQ ID NO: 371 - DNA, 4498 bp, synthetic construct
  source 1..4498: mol_type = other DNA
tcgcgcgtttcggtgatgacggtgaaaacctctgacacatgcagctcccggagacggtcacagcttgtctgtaagcggatgccgggagcagacaagcccgtcagggcgcgtcagcgggtgttggcgggtgtcggggctggcttaactatgcggcatcagagcagattgtactgagagtgcaccatatgcggtgtgaaataccgcacagatgcgtaaggagaaaataccgcatcaggcgccattcgccattcaggctgcgcaactgttgggaagggcgatcggtgcgggcctcttcgctattacgccagctggcgaaagggggatgtgctgcaaggcgattaagttgggtaacgccagggttttcccagtcacgacgttgtaaaacgacggccagtgaattcgagctcggtacccggggatttggagttgtcaatgaaatgaattggactggatggttaaggatgcccagaagattgaataaaattgggatttaggaggacccttgtactccaggaaattctccaagtctccacttagttatccagatcctcaaagtgaacatgaagcttcagtttcaaattgaatacattttccatccatggattggcttgttttgttcagttgagtgcttgaggttgtcttttcgacgtaacagctaaacccacggcttcctttctcgtaaaaccaaaacaaaaaggctttctattcaagtgccttctgtgtgtgcacatgtgtaatacatatctgggatcaaagctatctatataaagtccttgattctgtgtgggttcaaacacatttcaaagcttcaggatcctgaaaggttttgctctacttcctgaagacctgaacaccgctcccataaagccatgggggcaggtgccactggccgcgccatggacgggccgcgcctgctgctgttgctgcttctgggggtgtcccttggaggtgccaaggaggcatgccccacaggcctgtacacacacagcggtgagtgctgcaaagcctgcaacctgggcgagggtgtggcccagccttgtggagccaaccagaccgtgtgtgagccctgcctggacagcgtgacgttctccgacgtggtgagcgcgaccgagccgtgcaagccgtgcaccgagtgcgtggggctccagagcatgtcggcgccatgcgtggaggccgacgacgccgtgtgccgctgcgcctacggctactaccaggatgagacgactgggcgctgcgaggcgtgccgcgtgtgcgaggcgggctcgggcctcgtgttctcctgccaggacaagcagaacaccgtgtgcgaggagtgccccgacggcacgtattccgacgaggccaaccacgtggacccgtgcctgccctgcaccgtgtgcgaggacaccgagcgccagctccgcgagtgcacacgctgggccgacgccgagtgcgaggagatccctggccgttggattacacggtccacacccccagagggctcggacagcacagcccccagcacccaggagcctgaggcacctccagaacaagacctcatagccagcacggtggcaggtgtggtgaccacagtgatgggcagctcccagcccgtggtgacccgaggcaccaccgacaacctcatccctgtctattgctccatcctggctgctgtggttgtgggtcttgtggcctacatagccttcaagaggtggaacagccgcgccaagcgctcgggttcgggtgccaccaacttcagcctgctgaagcaggccggcgacgtggaggagaaccccggccccatggcttgccttggatttcagcggcacaaggctcagctgaacctggctaccaggacctggccctgcactctcctgttttttcttctcttcatccctgtcttctgcaaaggtgagtgagacttttggagcatgaagatggaggaggtgtttctcctacctgggtttcatttgtttcagcagtcaaaggcagtgatttatagcaaagccagaagttaaaggtaaaactccaatctggcttggctggctctgtattccagggccagcagggagcagttgggcggcagcaaataaggcaaagagatagctcagaacagagcgccaggtatttagtaggggcttcatgaatgcatgtgagttggtttagtagagagacacaggcaatttcagacccttctatgagactggaagtgatttaagagggaaaggatagccatagtcctgaatacattttcctctagagtcgacctgcaggcatgcaagcttggcgtaatcatggtcatagctgtttcctgtgtgaaattgttatccgctcacaattccacacaacatacgagccggaagcataaagtgtaaagcctggggtgcctaatgagtgagctaactcacattaattgcgttgcgctcactgcccgctttccagtcgggaaacctgtcgtgccagctgcattaatgaatcggccaacgcgcggggagaggcggtttgcgtattgggcgctcttccgcttcctcgctcactgactcgctgcgctcggtcgttcggctgcggcgagcggtatcagctcactcaaaggcggtaatacggttatccacagaatcaggggataacgcaggaaagaacatgtgagcaaaaggccagcaaaaggccaggaaccgtaaaaaggccgcgttgctggcgtttttccataggctccgcccccctgacgagcatcacaaaaatcgacgctcaagtcagaggtggcgaaacccgacaggactataaagataccaggcgtttccccctggaagctccctcgtgcgctctcctgttccgaccctgccgcttaccggatacctgtccgcctttctcccttcgggaagcgtggcgctttctcatagctcacgctgtaggtatctcagttcggtgtaggtcgttcgctccaagctgggctgtgtgcacgaaccccccgttcagcccgaccgctgcgccttatccggtaactatcgtcttgagtccaacccggtaagacacgacttatcgccactggcagcagccactggtaacaggattagcagagcgaggtatgtaggcggtgctacagagttcttgaagtggtggcctaactacggctacactagaaggacagtatttggtatctgcgctctgctgaagccagttaccttcggaaaaagagttggtagctcttgatccggcaaacaaaccaccgctggtagcggtggtttttttgtttgcaagcagcagattacgcgcagaaaaaaaggatctcaagaagatcctttgatcttttctacggggtctgacgctcagtggaacgaaaactcacgttaagggattttggtcatgagattatcaaaaaggatcttcacctagatccttttaaattaaaaatgaagttttaaatcaatctaaagtatatatgagtaaacttggtctgacagttaccaatgcttaatcagtgaggcacctatctcagcgatctgtctatttcgttcatccatagttgcctgactccccgtcgtgtagataactacgatacgggagggcttaccatctggccccagtgctgcaatgataccgcgagacccacgctcaccggctccagatttatcagcaataaaccagccagccggaagggccgagcgcagaagtggtcctgcaactttatccgcctccatccagtctattaattgttgccgggaagctagagtaagtagttcgccagttaatagtttgcgcaacgttgttgccattgctacaggcatcgtggtgtcacgctcgtcgtttggtatggcttcattcagctccggttcccaacgatcaaggcgagttacatgatcccccatgttgtgcaaaaaagcggttagctccttcggtcctccgatcgttgtcagaagtaagttggccgcagtgttatcactcatggttatggcagcactgcataattctcttactgtcatgccatccgtaagatgcttttctgtgactggtgagtactcaaccaagtcattctgagaatagtgtatgcggcgaccgagttgctcttgcccggcgtcaatacgggataataccgcgccacatagcagaactttaaaagtgctcatcattggaaaacgttcttcggggcgaaaactctcaaggatcttaccgctgttgagatccagttcgatgtaacccactcgtgcacccaactgatcttcagcatcttttactttcaccagcgtttctgggtgagcaaaaacaggaaggcaaaatgccgcaaaaaagggaataagggcgacacggaaatgttgaatactcatactcttcctttttcaatattattgaagcatttatcagggttattgtctcatgagcggatacatatttgaatgtatttagaaaaataaacaaataggggttccgcgcacatttccccgaaaagtgccacctgacgtctaagaaaccattattatcatgacattaacctataaaaataggcgtatcacgaggccctttcgtc

SEQ ID NO: 372 - DNA, 4280 bp, synthetic construct
  source 1..4280: mol_type = other DNA
tcgcgcgtttcggtgatgacggtgaaaacctctgacacatgcagctcccggagacggtcacagcttgtctgtaagcggatgccgggagcagacaagcccgtcagggcgcgtcagcgggtgttggcgggtgtcggggctggcttaactatgcggcatcagagcagattgtactgagagtgcaccatatgcggtgtgaaataccgcacagatgcgtaaggagaaaataccgcatcaggcgccattcgccattcaggctgcgcaactgttgggaagggcgatcggtgcgggcctcttcgctattacgccagctggcgaaagggggatgtgctgcaaggcgattaagttgggtaacgccagggttttcccagtcacgacgttgtaaaacgacggccagtgaattcgagctcggtacccggggaaggggtgaaggcccagagaccagcagaacggcatcccagccacgacggccactttgctctgtctgctctccgccacggccctgctctgttccctgggacacccccgcccccacctcctcaggctgcctgatctgcccagctttccagctttcctctggattccggcctctggtcatccctccccaccctctctccaaggccctctcctggtctcccttcttctagaaccccttcctccacctccctctctgcagaacttctcctttaccccccaccccccaccactgccccctttccttttctgacctccttttggagggctcagcgctgcccagaccataggagagatgggggcaggtgccactggccgcgccatggacgggccgcgcctgctgctgttgctgcttctgggggtgtcccttggaggtgccaaggaggcatgccccacaggcctgtacacacacagcggtgagtgctgcaaagcctgcaacctgggcgagggtgtggcccagccttgtggagccaaccagaccgtgtgtgagccctgcctggacagcgtgacgttctccgacgtggtgagcgcgaccgagccgtgcaagccgtgcaccgagtgcgtggggctccagagcatgtcggcgccatgcgtggaggccgacgacgccgtgtgccgctgcgcctacggctactaccaggatgagacgactgggcgctgcgaggcgtgccgcgtgtgcgaggcgggctcgggcctcgtgttctcctgccaggacaagcagaacaccgtgtgcgaggagtgccccgacggcacgtattccgacgaggccaaccacgtggacccgtgcctgccctgcaccgtgtgcgaggacaccgagcgccagctccgcgagtgcacacgctgggccgacgccgagtgcgaggagatccctggccgttggattacacggtccacacccccagagggctcggacagcacagcccccagcacccaggagcctgaggcacctccagaacaagacctcatagccagcacggtggcaggtgtggtgaccacagtgatgggcagctcccagcccgtggtgacccgaggcaccaccgacaacctcatccctgtctattgctccatcctggctgctgtggttgtgggtcttgtggcctacatagccttcaagaggtggaacagccgcgccaagcgctcgggttcgggtgccaccaacttcagcctgctgaagcaggccggcgacgtggaggagaaccccggccccatgtgggaggctcagttcctgggcttgctgtttctgcagccgctttgggtggctccaggtaaaacggggatggcgggagggttgacctccagccccacaggaggggaccagcagggatctctgtggccacaaaggtcctgaggtccttagctctgtggattcttctaatcccttttttgggcagtccttccaccccgaaagcctctctgggcagagaagaaacagaaacccaagttcttcctgcaccctgtttctccctcgggaaacacccaggctccttctctacccctgcctctcggctcacgccccctccccttggcctctcttttgctcactcctctagagtcgacctgcaggcatgcaagcttggcgtaatcatggtcatagctgtttcctgtgtgaaattgttatccgctcacaattccacacaacatacgagccggaagcataaagtgtaaagcctggggtgcctaatgagtgagctaactcacattaattgcgttgcgctcactgcccgctttccagtcgggaaacctgtcgtgccagctgcattaatgaatcggccaacgcgcggggagaggcggtttgcgtattgggcgctcttccgcttcctcgctcactgactcgctgcgctcggtcgttcggctgcggcgagcggtatcagctcactcaaaggcggtaatacggttatccacagaatcaggggataacgcaggaaagaacatgtgagcaaaaggccagcaaaaggccaggaaccgtaaaaaggccgcgttgctggcgtttttccataggctccgcccccctgacgagcatcacaaaaatcgacgctcaagtcagaggtggcgaaacccgacaggactataaagataccaggcgtttccccctggaagctccctcgtgcgctctcctgttccgaccctgccgcttaccggatacctgtccgcctttctcccttcgggaagcgtggcgctttctcatagctcacgctgtaggtatctcagttcggtgtaggtcgttcgctccaagctgggctgtgtgcacgaaccccccgttcagcccgaccgctgcgccttatccggtaactatcgtcttgagtccaacccggtaagacacgacttatcgccactggcagcagccactggtaacaggattagcagagcgaggtatgtaggcggtgctacagagttcttgaagtggtggcctaactacggctacactagaaggacagtatttggtatctgcgctctgctgaagccagttaccttcggaaaaagagttggtagctcttgatccggcaaacaaaccaccgctggtagcggtggtttttttgtttgcaagcagcagattacgcgcagaaaaaaaggatctcaagaagatcctttgatcttttctacggggtctgacgctcagtggaacgaaaactcacgttaagggattttggtcatgagattatcaaaaaggatcttcacctagatccttttaaattaaaaatgaagttttaaatcaatctaaagtatatatgagtaaacttggtctgacagttaccaatgcttaatcagtgaggcacctatctcagcgatctgtctatttcgttcatccatagttgcctgactccccgtcgtgtagataactacgatacgggagggcttaccatctggccccagtgctgcaatgataccgcgagacccacgctcaccggctccagatttatcagcaataaaccagccagccggaagggccgagcgcagaagtggtcctgcaactttatccgcctccatccagtctattaattgttgccgggaagctagagtaagtagttcgccagttaatagtttgcgcaacgttgttgccattgctacaggcatcgtggtgtcacgctcgtcgtttggtatggcttcattcagctccggttcccaacgatcaaggcgagttacatgatcccccatgttgtgcaaaaaagcggttagctccttcggtcctccgatcgttgtcagaagtaagttggccgcagtgttatcactcatggttatggcagcactgcataattctcttactgtcatgccatccgtaagatgcttttctgtgactggtgagtactcaaccaagtcattctgagaatagtgtatgcggcgaccgagttgctcttgcccggcgtcaatacgggataataccgcgccacatagcagaactttaaaagtgctcatcattggaaaacgttcttcggggcgaaaactctcaaggatcttaccgctgttgagatccagttcgatgtaacccactcgtgcacccaactgatcttcagcatcttttactttcaccagcgtttctgggtgagcaaaaacaggaaggcaaaatgccgcaaaaaagggaataagggcgacacggaaatgttgaatactcatactcttcctttttcaatattattgaagcatttatcagggttattgtctcatgagcggatacatatttgaatgtatttagaaaaataaacaaataggggttccgcgcacatttccccgaaaagtgccacctgacgtctaagaaaccattattatcatgacattaacctataaaaataggcgtatcacgaggccctttcgtc

SEQ ID NO: 373 - DNA, 4247 bp, synthetic construct
  source 1..4247: mol_type = other DNA
tcgcgcgtttcggtgatgacggtgaaaacctctgacacatgcagctcccggagacggtcacagcttgtctgtaagcggatgccgggagcagacaagcccgtcagggcgcgtcagcgggtgttggcgggtgtcggggctggcttaactatgcggcatcagagcagattgtactgagagtgcaccatatgcggtgtgaaataccgcacagatgcgtaaggagaaaataccgcatcaggcgccattcgccattcaggctgcgcaactgttgggaagggcgatcggtgcgggcctcttcgctattacgccagctggcgaaagggggatgtgctgcaaggcgattaagttgggtaacgccagggttttcccagtcacgacgttgtaaaacgacggccagtgaattcgagctcggtacccggggatttcaagcaccccttttacacaactcttgatatccatcaataaagaataattcccataagcccatcatgtagtgaccgactatttttcagtgacaaaaaaaaagtctttaaaaatagaagtaaaagtctaaagtcatcaaaacaacgttatatcctgtgtgaaatgctgcagtcaggatgccttgtggtttgagtgccttgatcatgtgccctaaggggatggtggcggtggtggtggccgtggatgacggagactctcaggccttggcaggtgcgtctttcagttcccctcacacttcgggttcctcggggaggaggggctggaaccctagcccatcgtcaggacaaagatgggggcaggtgccactggccgcgccatggacgggccgcgcctgctgctgttgctgcttctgggggtgtcccttggaggtgccaaggaggcatgccccacaggcctgtacacacacagcggtgagtgctgcaaagcctgcaacctgggcgagggtgtggcccagccttgtggagccaaccagaccgtgtgtgagccctgcctggacagcgtgacgttctccgacgtggtgagcgcgaccgagccgtgcaagccgtgcaccgagtgcgtggggctccagagcatgtcggcgccatgcgtggaggccgacgacgccgtgtgccgctgcgcctacggctactaccaggatgagacgactgggcgctgcgaggcgtgccgcgtgtgcgaggcgggctcgggcctcgtgttctcctgccaggacaagcagaacaccgtgtgcgaggagtgccccgacggcacgtattccgacgaggccaaccacgtggacccgtgcctgccctgcaccgtgtgcgaggacaccgagcgccagctccgcgagtgcacacgctgggccgacgccgagtgcgaggagatccctggccgttggattacacggtccacacccccagagggctcggacagcacagcccccagcacccaggagcctgaggcacctccagaacaagacctcatagccagcacggtggcaggtgtggtgaccacagtgatgggcagctcccagcccgtggtgacccgaggcaccaccgacaacctcatccctgtctattgctccatcctggctgctgtggttgtgggtcttgtggcctacatagccttcaagaggtggaacagccgcgccaagcgctcgggttcgggtgccaccaacttcagcctgctgaagcaggccggcgacgtggaggagaaccccggccccatgctcagactgctcttagctctcaacttattcccttcaattcaagtaacaggtaaacaatgttaatgtctttctttctgtaaatattttttgaggtcttccaattggcttagtttattttaaatttctaacaatgtgtgaaatttgaacatttgaagtgtagttttgctgtaatagggcaatgtgttattttgaaaatcattgattctcagactacaatatagtatcttaacaaaagtcccttggaaataaattttctaagctattagtttctctagctattagttgatagtgtcccatcctctagagtcgacctgcaggcatgcaagcttggcgtaatcatggtcatagctgtttcctgtgtgaaattgttatccgctcacaattccacacaacatacgagccggaagcataaagtgtaaagcctggggtgcctaatgagtgagctaactcacattaattgcgttgcgctcactgcccgctttccagtcgggaaacctgtcgtgccagctgcattaatgaatcggccaacgcgcggggagaggcggtttgcgtattgggcgctcttccgcttcctcgctcactgactcgctgcgctcggtcgttcggctgcggcgagcggtatcagctcactcaaaggcggtaatacggttatccacagaatcaggggataacgcaggaaagaacatgtgagcaaaaggccagcaaaaggccaggaaccgtaaaaaggccgcgttgctggcgtttttccataggctccgcccccctgacgagcatcacaaaaatcgacgctcaagtcagaggtggcgaaacccgacaggactataaagataccaggcgtttccccctggaagctccctcgtgcgctctcctgttccgaccctgccgcttaccggatacctgtccgcctttctcccttcgggaagcgtggcgctttctcatagctcacgctgtaggtatctcagttcggtgtaggtcgttcgctccaagctgggctgtgtgcacgaaccccccgttcagcccgaccgctgcgccttatccggtaactatcgtcttgagtccaacccggtaagacacgacttatcgccactggcagcagccactggtaacaggattagcagagcgaggtatgtaggcggtgctacagagttcttgaagtggtggcctaactacggctacactagaaggacagtatttggtatctgcgctctgctgaagccagttaccttcggaaaaagagttggtagctcttgatccggcaaacaaaccaccgctggtagcggtggtttttttgtttgcaagcagcagattacgcgcagaaaaaaaggatctcaagaagatcctttgatcttttctacggggtctgacgctcagtggaacgaaaactcacgttaagggattttggtcatgagattatcaaaaaggatcttcacctagatccttttaaattaaaaatgaagttttaaatcaatctaaagtatatatgagtaaacttggtctgacagttaccaatgcttaatcagtgaggcacctatctcagcgatctgtctatttcgttcatccatagttgcctgactccccgtcgtgtagataactacgatacgggagggcttaccatctggccccagtgctgcaatgataccgcgagacccacgctcaccggctccagatttatcagcaataaaccagccagccggaagggccgagcgcagaagtggtcctgcaactttatccgcctccatccagtctattaattgttgccgggaagctagagtaagtagttcgccagttaatagtttgcgcaacgttgttgccattgctacaggcatcgtggtgtcacgctcgtcgtttggtatggcttcattcagctccggttcccaacgatcaaggcgagttacatgatcccccatgttgtgcaaaaaagcggttagctccttcggtcctccgatcgttgtcagaagtaagttggccgcagtgttatcactcatggttatggcagcactgcataattctcttactgtcatgccatccgtaagatgcttttctgtgactggtgagtactcaaccaagtcattctgagaatagtgtatgcggcgaccgagttgctcttgcccggcgtcaatacgggataataccgcgccacatagcagaactttaaaagtgctcatcattggaaaacgttcttcggggcgaaaactctcaaggatcttaccgctgttgagatccagttcgatgtaacccactcgtgcacccaactgatcttcagcatcttttactttcaccagcgtttctgggtgagcaaaaacaggaaggcaaaatgccgcaaaaaagggaataagggcgacacggaaatgttgaatactcatactcttcctttttcaatattattgaagcatttatcagggttattgtctcatgagcggatacatatttgaatgtatttagaaaaataaacaaataggggttccgcgcacatttccccgaaaagtgccacctgacgtctaagaaaccattattatcatgacattaacctataaaaataggcgtatcacgaggccctttcgtc

SEQ ID NO: 374 - DNA, 4398 bp, synthetic construct
  source 1..4398: mol_type = other DNA
tcgcgcgtttcggtgatgacggtgaaaacctctgacacatgcagctcccggagacggtcacagcttgtctgtaagcggatgccgggagcagacaagcccgtcagggcgcgtcagcgggtgttggcgggtgtcggggctggcttaactatgcggcatcagagcagattgtactgagagtgcaccatatgcggtgtgaaataccgcacagatgcgtaaggagaaaataccgcatcaggcgccattcgccattcaggctgcgcaactgttgggaagggcgatcggtgcgggcctcttcgctattacgccagctggcgaaagggggatgtgctgcaaggcgattaagttgggtaacgccagggttttcccagtcacgacgttgtaaaacgacggccagtgaattcgagctcggtacccggggaaagtgcatgaataggaggggtgagcaactgtgtgtccatcacctttttgtcaaagaagcaggagtcagtgggctacgtgcttcatgagcaggagaggcggaaactaaggaaggctcatgtgttggaggaagcatgtttgaagagcagcaggtctcacagagtttgctctttaatactctccccagcacacggaaggggaagggggtggaggttgctgctatgagagagaaaaaaaaaacagccacaatagagattctgccttcaaaggttggcttgccacctgaagcagccactgcccagggggtgcaaagaagagacagcagcgcccagcttggaggtgctaactccagaggccagcatcagcaactgggcacagaaaggagccgcctgggcagggaccatgggggcaggtgccactggccgcgccatggacgggccgcgcctgctgctgttgctgcttctgggggtgtcccttggaggtgccaaggaggcatgccccacaggcctgtacacacacagcggtgagtgctgcaaagcctgcaacctgggcgagggtgtggcccagccttgtggagccaaccagaccgtgtgtgagccctgcctggacagcgtgacgttctccgacgtggtgagcgcgaccgagccgtgcaagccgtgcaccgagtgcgtggggctccagagcatgtcggcgccatgcgtggaggccgacgacgccgtgtgccgctgcgcctacggctactaccaggatgagacgactgggcgctgcgaggcgtgccgcgtgtgcgaggcgggctcgggcctcgtgttctcctgccaggacaagcagaacaccgtgtgcgaggagtgccccgacggcacgtattccgacgaggccaaccacgtggacccgtgcctgccctgcaccgtgtgcgaggacaccgagcgccagctccgcgagtgcacacgctgggccgacgccgagtgcgaggagatccctggccgttggattacacggtccacacccccagagggctcggacagcacagcccccagcacccaggagcctgaggcacctccagaacaagacctcatagccagcacggtggcaggtgtggtgaccacagtgatgggcagctcccagcccgtggtgacccgaggcaccaccgacaacctcatccctgtctattgctccatcctggctgctgtggttgtgggtcttgtggcctacatagccttcaagaggtggaacagccgcgccaagcgctcgggttcgggtgccaccaacttcagcctgctgaagcaggccggcgacgtggaggagaaccccggccccgcacggccacatccctggtggctgtgcgttctggggaccctggtggggctctcagctactccagcccccaagagctgcccagagaggcactactgggctcagggaaagctgtgctgccagatgtgtgagccaggtaagagggggccttggtaagggccaggtgagtggcgaaagagagaggactggggttaatacagtaaataggcgcagggtgagactgagctcaagcaaggagggaaatcctgcagctgtggggaggcaccaccttgaagagggcagagaaccagcccttctcaggccttgatcccttaccctctcctcccaggaacattcctcgtgaaggactgtgaccagcatagaaaggctgctcagtgtgatccttgcataccgggggtctccttcctctagagtcgacctgcaggcatgcaagcttggcgtaatcatggtcatagctgtttcctgtgtgaaattgttatccgctcacaattccacacaacatacgagccggaagcataaagtgtaaagcctggggtgcctaatgagtgagctaactcacattaattgcgttgcgctcactgcccgctttccagtcgggaaacctgtcgtgccagctgcattaatgaatcggccaacgcgcggggagaggcggtttgcgtattgggcgctcttccgcttcctcgctcactgactcgctgcgctcggtcgttcggctgcggcgagcggtatcagctcactcaaaggcggtaatacggttatccacagaatcaggggataacgcaggaaagaacatgtgagcaaaaggccagcaaaaggccaggaaccgtaaaaaggccgcgttgctggcgtttttccataggctccgcccccctgacgagcatcacaaaaatcgacgctcaagtcagaggtggcgaaacccgacaggactataaagataccaggcgtttccccctggaagctccctcgtgcgctctcctgttccgaccctgccgcttaccggatacctgtccgcctttctcccttcgggaagcgtggcgctttctcatagctcacgctgtaggtatctcagttcggtgtaggtcgttcgctccaagctgggctgtgtgcacgaaccccccgttcagcccgaccgctgcgccttatccggtaactatcgtcttgagtccaacccggtaagacacgacttatcgccactggcagcagccactggtaacaggattagcagagcgaggtatgtaggcggtgctacagagttcttgaagtggtggcctaactacggctacactagaaggacagtatttggtatctgcgctctgctgaagccagttaccttcggaaaaagagttggtagctcttgatccggcaaacaaaccaccgctggtagcggtggtttttttgtttgcaagcagcagattacgcgcagaaaaaaaggatctcaagaagatcctttgatcttttctacggggtctgacgctcagtggaacgaaaactcacgttaagggattttggtcatgagattatcaaaaaggatcttcacctagatccttttaaattaaaaatgaagttttaaatcaatctaaagtatatatgagtaaacttggtctgacagttaccaatgcttaatcagtgaggcacctatctcagcgatctgtctatttcgttcatccatagttgcctgactccccgtcgtgtagataactacgatacgggagggcttaccatctggccccagtgctgcaatgataccgcgagacccacgctcaccggctccagatttatcagcaataaaccagccagccggaagggccgagcgcagaagtggtcctgcaactttatccgcctccatccagtctattaattgttgccgggaagctagagtaagtagttcgccagttaatagtttgcgcaacgttgttgccattgctacaggcatcgtggtgtcacgctcgtcgtttggtatggcttcattcagctccggttcccaacgatcaaggcgagttacatgatcccccatgttgtgcaaaaaagcggttagctccttcggtcctccgatcgttgtcagaagtaagttggccgcagtgttatcactcatggttatggcagcactgcataattctcttactgtcatgccatccgtaagatgcttttctgtgactggtgagtactcaaccaagtcattctgagaatagtgtatgcggcgaccgagttgctcttgcccggcgtcaatacgggataataccgcgccacatagcagaactttaaaagtgctcatcattggaaaacgttcttcggggcgaaaactctcaaggatcttaccgctgttgagatccagttcgatgtaacccactcgtgcacccaactgatcttcagcatcttttactttcaccagcgtttctgggtgagcaaaaacaggaaggcaaaatgccgcaaaaaagggaataagggcgacacggaaatgttgaatactcatactcttcctttttcaatattattgaagcatttatcagggttattgtctcatgagcggatacatatttgaatgtatttagaaaaataaacaaataggggttccgcgcacatttccccgaaaagtgccacctgacgtctaagaaaccattattatcatgacattaacctataaaaataggcgtatcacgaggccctttcgtc

SEQ ID NO: 375 - DNA, 4398 bp, synthetic construct
  source 1..4398: mol_type = other DNA
tcgcgcgtttcggtgatgacggtgaaaacctctgacacatgcagctcccggagacggtcacagcttgtctgtaagcggatgccgggagcagacaagcccgtcagggcgcgtcagcgggtgttggcgggtgtcggggctggcttaactatgcggcatcagagcagattgtactgagagtgcaccatatgcggtgtgaaataccgcacagatgcgtaaggagaaaataccgcatcaggcgccattcgccattcaggctgcgcaactgttgggaagggcgatcggtgcgggcctcttcgctattacgccagctggcgaaagggggatgtgctgcaaggcgattaagttgggtaacgccagggttttcccagtcacgacgttgtaaaacgacggccagtgaattcgagctcggtacccggggaaagcaagactctgtctcaaaaaaataaaaattaaaaaaataaagtagcctctagcctaagatagcttgagcctaggtgtgaatctactgccttactctgatgtaagcacagtaagtgtgggggctgcagggaatatccaggaggaacaataatttcagaggctctgtctcttcatgtccttgacctctgcttacagcagcaatacttttactcagacttcctgtttctggaacttgccttcttttttgctgtgtttatacttcccttgtctgtggttagataagtataaagccctagatctaagcttctctgtcttcctccctccctcccttcctcttactctcattcatttcatacacactggctcacacatctactctctctctctatctctctcagaatgggggcaggtgccactggccgcgccatggacgggccgcgcctgctgctgttgctgcttctgggggtgtcccttggaggtgccaaggaggcatgccccacaggcctgtacacacacagcggtgagtgctgcaaagcctgcaacctgggcgagggtgtggcccagccttgtggagccaaccagaccgtgtgtgagccctgcctggacagcgtgacgttctccgacgtggtgagcgcgaccgagccgtgcaagccgtgcaccgagtgcgtggggctccagagcatgtcggcgccatgcgtggaggccgacgacgccgtgtgccgctgcgcctacggctactaccaggatgagacgactgggcgctgcgaggcgtgccgcgtgtgcgaggcgggctcgggcctcgtgttctcctgccaggacaagcagaacaccgtgtgcgaggagtgccccgacggcacgtattccgacgaggccaaccacgtggacccgtgcctgccctgcaccgtgtgcgaggacaccgagcgccagctccgcgagtgcacacgctgggccgacgccgagtgcgaggagatccctggccgttggattacacggtccacacccccagagggctcggacagcacagcccccagcacccaggagcctgaggcacctccagaacaagacctcatagccagcacggtggcaggtgtggtgaccacagtgatgggcagctcccagcccgtggtgacccgaggcaccaccgacaacctcatccctgtctattgctccatcctggctgctgtggttgtgggtcttgtggcctacatagccttcaagaggtggaacagccgcgccaagcgctcgggttcgggtgccaccaacttcagcctgctgaagcaggccggcgacgtggaggagaaccccggccccacaattctaggaactacattcgggatggttttttctttacttcaagtcgtttctggagaaagtggctatgctcaaaatggtgagtcatttctaagttttcttatggattttggattatctgtagcatggtttcaggttattcagttccctaacagacctgagtcaggcactgggtttgaatgcagtttgagaatttcccacatattcagtcattttttttaatgtttaaccaccatgacagggggcaggggatcaatactatgggtggtttataagacctcagtattctcaagaaggaatgcatttcactcccaagtgtagatcttaaatgttgaatgattactctgctcttacaaaaagaatgctcatgtagatgctatgactgtacttgtaggaaaattcctctagagtcgacctgcaggcatgcaagcttggcgtaatcatggtcatagctgtttcctgtgtgaaattgttatccgctcacaattccacacaacatacgagccggaagcataaagtgtaaagcctggggtgcctaatgagtgagctaactcacattaattgcgttgcgctcactgcccgctttccagtcgggaaacctgtcgtgccagctgcattaatgaatcggccaacgcgcggggagaggcggtttgcgtattgggcgctcttccgcttcctcgctcactgactcgctgcgctcggtcgttcggctgcggcgagcggtatcagctcactcaaaggcggtaatacggttatccacagaatcaggggataacgcaggaaagaacatgtgagcaaaaggccagcaaaaggccaggaaccgtaaaaaggccgcgttgctggcgtttttccataggctccgcccccctgacgagcatcacaaaaatcgacgctcaagtcagaggtggcgaaacccgacaggactataaagataccaggcgtttccccctggaagctccctcgtgcgctctcctgttccgaccctgccgcttaccggatacctgtccgcctttctcccttcgggaagcgtggcgctttctcatagctcacgctgtaggtatctcagttcggtgtaggtcgttcgctccaagctgggctgtgtgcacgaaccccccgttcagcccgaccgctgcgccttatccggtaactatcgtcttgagtccaacccggtaagacacgacttatcgccactggcagcagccactggtaacaggattagcagagcgaggtatgtaggcggtgctacagagttcttgaagtggtggcctaactacggctacactagaaggacagtatttggtatctgcgctctgctgaagccagttaccttcggaaaaagagttggtagctcttgatccggcaaacaaaccaccgctggtagcggtggtttttttgtttgcaagcagcagattacgcgcagaaaaaaaggatctcaagaagatcctttgatcttttctacggggtctgacgctcagtggaacgaaaactcacgttaagggattttggtcatgagattatcaaaaaggatcttcacctagatccttttaaattaaaaatgaagttttaaatcaatctaaagtatatatgagtaaacttggtctgacagttaccaatgcttaatcagtgaggcacctatctcagcgatctgtctatttcgttcatccatagttgcctgactccccgtcgtgtagataactacgatacgggagggcttaccatctggccccagtgctgcaatgataccgcgagacccacgctcaccggctccagatttatcagcaataaaccagccagccggaagggccgagcgcagaagtggtcctgcaactttatccgcctccatccagtctattaattgttgccgggaagctagagtaagtagttcgccagttaatagtttgcgcaacgttgttgccattgctacaggcatcgtggtgtcacgctcgtcgtttggtatggcttcattcagctccggttcccaacgatcaaggcgagttacatgatcccccatgttgtgcaaaaaagcggttagctccttcggtcctccgatcgttgtcagaagtaagttggccgcagtgttatcactcatggttatggcagcactgcataattctcttactgtcatgccatccgtaagatgcttttctgtgactggtgagtactcaaccaagtcattctgagaatagtgtatgcggcgaccgagttgctcttgcccggcgtcaatacgggataataccgcgccacatagcagaactttaaaagtgctcatcattggaaaacgttcttcggggcgaaaactctcaaggatcttaccgctgttgagatccagttcgatgtaacccactcgtgcacccaactgatcttcagcatcttttactttcaccagcgtttctgggtgagcaaaaacaggaaggcaaaatgccgcaaaaaagggaataagggcgacacggaaatgttgaatactcatactcttcctttttcaatattattgaagcatttatcagggttattgtctcatgagcggatacatatttgaatgtatttagaaaaataaacaaataggggttccgcgcacatttccccgaaaagtgccacctgacgtctaagaaaccattattatcatgacattaacctataaaaataggcgtatcacgaggccctttcgtc

SEQ ID NO: 376 - DNA, 4400 bp, synthetic construct
  source 1..4400: mol_type = other DNA
tcgcgcgtttcggtgatgacggtgaaaacctctgacacatgcagctcccggagacggtcacagcttgtctgtaagcggatgccgggagcagacaagcccgtcagggcgcgtcagcgggtgttggcgggtgtcggggctggcttaactatgcggcatcagagcagattgtactgagagtgcaccatatgcggtgtgaaataccgcacagatgcgtaaggagaaaataccgcatcaggcgccattcgccattcaggctgcgcaactgttgggaagggcgatcggtgcgggcctcttcgctattacgccagctggcgaaagggggatgtgctgcaaggcgattaagttgggtaacgccagggttttcccagtcacgacgttgtaaaacgacggccagtgaattcgagctcggtacccggggagtggtgaaaacagacaataatgaaaataaaatatgtggtaggtcagatggtggtgtaagtactatgaagaaaaataaaccagggaaaagagagagcatgtttccagggtgggaggtggttgcagtttaaataaaagaggccagagaaggctgccctgatatgttgacaataagcaaagacatgaagatgtgtttcgtggaggagaaaaaaagttcatccccaaactcaattaaaaacaggctttagactataaatgccatttaaataaaatattcctgggacaaactatgttttggattaagcaagatatttaagagtacaacctgatgctaggaaggctttctttggagctatggtttccatatacatagaaagaatgtatattctttttccctataggatgggggcaggtgccactggccgcgccatggacgggccgcgcctgctgctgttgctgcttctgggggtgtcccttggaggtgccaaggaggcatgccccacaggcctgtacacacacagcggtgagtgctgcaaagcctgcaacctgggcgagggtgtggcccagccttgtggagccaaccagaccgtgtgtgagccctgcctggacagcgtgacgttctccgacgtggtgagcgcgaccgagccgtgcaagccgtgcaccgagtgcgtggggctccagagcatgtcggcgccatgcgtggaggccgacgacgccgtgtgccgctgcgcctacggctactaccaggatgagacgactgggcgctgcgaggcgtgccgcgtgtgcgaggcgggctcgggcctcgtgttctcctgccaggacaagcagaacaccgtgtgcgaggagtgccccgacggcacgtattccgacgaggccaaccacgtggacccgtgcctgccctgcaccgtgtgcgaggacaccgagcgccagctccgcgagtgcacacgctgggccgacgccgagtgcgaggagatccctggccgttggattacacggtccacacccccagagggctcggacagcacagcccccagcacccaggagcctgaggcacctccagaacaagacctcatagccagcacggtggcaggtgtggtgaccacagtgatgggcagctcccagcccgtggtgacccgaggcaccaccgacaacctcatccctgtctattgctccatcctggctgctgtggttgtgggtcttgtggcctacatagccttcaagaggtggaacagccgcgccaagcgctcgggttcgggtgccaccaacttcagcctgctgaagcaggccggcgacgtggaggagaaccccggcccctctcagtggtacgaacttcagcagcttgactcaaaattcctggagcaggttcaccagctttatgatgacagttttcccatggaaatcagacagtacctggcacagtggttagaaaagcaagactggtaaggaaaattcactagacagaagaagaagtttacaccttaaaagtactggttgattaagtgacttggggccatgtttactggaagatgaattccatcaatggccactggaattatttgttgtagaaaagtttgttgatttaaaaaatgactcaacaaagttgagccaaaaagtgtctcaacaaagttaagtatattagtcattaagcacttttatacagttttgccaaatttaatttatgatagatattcctaaatgctttggacaagttacggatcctctagagtcgacctgcaggcatgcaagcttggcgtaatcatggtcatagctgtttcctgtgtgaaattgttatccgctcacaattccacacaacatacgagccggaagcataaagtgtaaagcctggggtgcctaatgagtgagctaactcacattaattgcgttgcgctcactgcccgctttccagtcgggaaacctgtcgtgccagctgcattaatgaatcggccaacgcgcggggagaggcggtttgcgtattgggcgctcttccgcttcctcgctcactgactcgctgcgctcggtcgttcggctgcggcgagcggtatcagctcactcaaaggcggtaatacggttatccacagaatcaggggataacgcaggaaagaacatgtgagcaaaaggccagcaaaaggccaggaaccgtaaaaaggccgcgttgctggcgtttttccataggctccgcccccctgacgagcatcacaaaaatcgacgctcaagtcagaggtggcgaaacccgacaggactataaagataccaggcgtttccccctggaagctccctcgtgcgctctcctgttccgaccctgccgcttaccggatacctgtccgcctttctcccttcgggaagcgtggcgctttctcatagctcacgctgtaggtatctcagttcggtgtaggtcgttcgctccaagctgggctgtgtgcacgaaccccccgttcagcccgaccgctgcgccttatccggtaactatcgtcttgagtccaacccggtaagacacgacttatcgccactggcagcagccactggtaacaggattagcagagcgaggtatgtaggcggtgctacagagttcttgaagtggtggcctaactacggctacactagaaggacagtatttggtatctgcgctctgctgaagccagttaccttcggaaaaagagttggtagctcttgatccggcaaacaaaccaccgctggtagcggtggtttttttgtttgcaagcagcagattacgcgcagaaaaaaaggatctcaagaagatcctttgatcttttctacggggtctgacgctcagtggaacgaaaactcacgttaagggattttggtcatgagattatcaaaaaggatcttcacctagatccttttaaattaaaaatgaagttttaaatcaatctaaagtatatatgagtaaacttggtctgacagttaccaatgcttaatcagtgaggcacctatctcagcgatctgtctatttcgttcatccatagttgcctgactccccgtcgtgtagataactacgatacgggagggcttaccatctggccccagtgctgcaatgataccgcgagacccacgctcaccggctccagatttatcagcaataaaccagccagccggaagggccgagcgcagaagtggtcctgcaactttatccgcctccatccagtctattaattgttgccgggaagctagagtaagtagttcgccagttaatagtttgcgcaacgttgttgccattgctacaggcatcgtggtgtcacgctcgtcgtttggtatggcttcattcagctccggttcccaacgatcaaggcgagttacatgatcccccatgttgtgcaaaaaagcggttagctccttcggtcctccgatcgttgtcagaagtaagttggccgcagtgttatcactcatggttatggcagcactgcataattctcttactgtcatgccatccgtaagatgcttttctgtgactggtgagtactcaaccaagtcattctgagaatagtgtatgcggcgaccgagttgctcttgcccggcgtcaatacgggataataccgcgccacatagcagaactttaaaagtgctcatcattggaaaacgttcttcggggcgaaaactctcaaggatcttaccgctgttgagatccagttcgatgtaacccactcgtgcacccaactgatcttcagcatcttttactttcaccagcgtttctgggtgagcaaaaacaggaaggcaaaatgccgcaaaaaagggaataagggcgacacggaaatgttgaatactcatactcttcctttttcaatattattgaagcatttatcagggttattgtctcatgagcggatacatatttgaatgtatttagaaaaataaacaaataggggttccgcgcacatttccccgaaaagtgccacctgacgtctaagaaaccattattatcatgacattaacctataaaaataggcgtatcacgaggccctttcgtc

SEQ ID NO: 377 - DNA, 4302 bp, synthetic construct
  source 1..4302: mol_type = other DNA
tcgcgcgtttcggtgatgacggtgaaaacctctgacacatgcagctcccggagacggtcacagcttgtctgtaagcggatgccgggagcagacaagcccgtcagggcgcgtcagcgggtgttggcgggtgtcggggctggcttaactatgcggcatcagagcagattgtactgagagtgcaccatatgcggtgtgaaataccgcacagatgcgtaaggagaaaataccgcatcaggcgccattcgccattcaggctgcgcaactgttgggaagggcgatcggtgcgggcctcttcgctattacgccagctggcgaaagggggatgtgctgcaaggcgattaagttgggtaacgccagggttttcccagtcacgacgttgtaaaacgacggccagtgaattcgagctcggtacccggggaaatcggagcgcacttccgtggctgactagcgcggtataaaggcgtgtggctcaggctgagcggctgggaccttgagagcggccaggccagcctcggagccagcagggagctgggagctgggggaaacgacgccaggaaagctatcgcgccagagagggcgacgggggctcgggaagcctgacagggcttttgcgcacagctgccggctggctgctacccgcccgcgccagcccccgagaacgcgcgaccaggcacccagtccggtcaccgcagcggagagctcgccgctcgctgcagcgaggcccggagcggccccgcagggaccctccccagaccgcctgggccgcccggatgggggcaggtgccactggccgcgccatggacgggccgcgcctgctgctgttgctgcttctgggggtgtcccttggaggtgccaaggaggcatgccccacaggcctgtacacacacagcggtgagtgctgcaaagcctgcaacctgggcgagggtgtggcccagccttgtggagccaaccagaccgtgtgtgagccctgcctggacagcgtgacgttctccgacgtggtgagcgcgaccgagccgtgcaagccgtgcaccgagtgcgtggggctccagagcatgtcggcgccatgcgtggaggccgacgacgccgtgtgccgctgcgcctacggctactaccaggatgagacgactgggcgctgcgaggcgtgccgcgtgtgcgaggcgggctcgggcctcgtgttctcctgccaggacaagcagaacaccgtgtgcgaggagtgccccgacggcacgtattccgacgaggccaaccacgtggacccgtgcctgccctgcaccgtgtgcgaggacaccgagcgccagctccgcgagtgcacacgctgggccgacgccgagtgcgaggagatccctggccgttggattacacggtccacacccccagagggctcggacagcacagcccccagcacccaggagcctgaggcacctccagaacaagacctcatagccagcacggtggcaggtgtggtgaccacagtgatgggcagctcccagcccgtggtgacccgaggcaccaccgacaacctcatccctgtctattgctccatcctggctgctgtggttgtgggtcttgtggcctacatagccttcaagaggtggaacagccgcgccaagcgctcgggttcgggtgccaccaacttcagcctgctgaagcaggccggcgacgtggaggagaaccctggccctatgtgcactaaaatggaacagcccttctaccacgacgactcatacacagctacgggatacggccgggcccctggtggcctctctctacacgactacaaactcctgaaaccgagcctggcggtcaacctggccgacccctaccggagtctcaaagcgcctggggctcgcggacccggcccagagggcggcggtggcggcagctacttttctggtcagggctcggacaccggcgcgtctctcaagctcgcctcttcggagctggaacgcctgattgtccccaacagcaacggcgtgatcacgacgacgcctacacccccgggacagtacttttacccccgcgggggtggcagcggtcctctagagtcgacctgcaggcatgcaagcttggcgtaatcatggtcatagctgtttcctgtgtgaaattgttatccgctcacaattccacacaacatacgagccggaagcataaagtgtaaagcctggggtgcctaatgagtgagctaactcacattaattgcgttgcgctcactgcccgctttccagtcgggaaacctgtcgtgccagctgcattaatgaatcggccaacgcgcggggagaggcggtttgcgtattgggcgctcttccgcttcctcgctcactgactcgctgcgctcggtcgttcggctgcggcgagcggtatcagctcactcaaaggcggtaatacggttatccacagaatcaggggataacgcaggaaagaacatgtgagcaaaaggccagcaaaaggccaggaaccgtaaaaaggccgcgttgctggcgtttttccataggctccgcccccctgacgagcatcacaaaaatcgacgctcaagtcagaggtggcgaaacccgacaggactataaagataccaggcgtttccccctggaagctccctcgtgcgctctcctgttccgaccctgccgcttaccggatacctgtccgcctttctcccttcgggaagcgtggcgctttctcatagctcacgctgtaggtatctcagttcggtgtaggtcgttcgctccaagctgggctgtgtgcacgaaccccccgttcagcccgaccgctgcgccttatccggtaactatcgtcttgagtccaacccggtaagacacgacttatcgccactggcagcagccactggtaacaggattagcagagcgaggtatgtaggcggtgctacagagttcttgaagtggtggcctaactacggctacactagaaggacagtatttggtatctgcgctctgctgaagccagttaccttcggaaaaagagttggtagctcttgatccggcaaacaaaccaccgctggtagcggtggtttttttgtttgcaagcagcagattacgcgcagaaaaaaaggatctcaagaagatcctttgatcttttctacggggtctgacgctcagtggaacgaaaactcacgttaagggattttggtcatgagattatcaaaaaggatcttcacctagatccttttaaattaaaaatgaagttttaaatcaatctaaagtatatatgagtaaacttggtctgacagttaccaatgcttaatcagtgaggcacctatctcagcgatctgtctatttcgttcatccatagttgcctgactccccgtcgtgtagataactacgatacgggagggcttaccatctggccccagtgctgcaatgataccgcgagacccacgctcaccggctccagatttatcagcaataaaccagccagccggaagggccgagcgcagaagtggtcctgcaactttatccgcctccatccagtctattaattgttgccgggaagctagagtaagtagttcgccagttaatagtttgcgcaacgttgttgccattgctacaggcatcgtggtgtcacgctcgtcgtttggtatggcttcattcagctccggttcccaacgatcaaggcgagttacatgatcccccatgttgtgcaaaaaagcggttagctccttcggtcctccgatcgttgtcagaagtaagttggccgcagtgttatcactcatggttatggcagcactgcataattctcttactgtcatgccatccgtaagatgcttttctgtgactggtgagtactcaaccaagtcattctgagaatagtgtatgcggcgaccgagttgctcttgcccggcgtcaatacgggataataccgcgccacatagcagaactttaaaagtgctcatcattggaaaacgttcttcggggcgaaaactctcaaggatcttaccgctgttgagatccagttcgatgtaacccactcgtgcacccaactgatcttcagcatcttttactttcaccagcgtttctgggtgagcaaaaacaggaaggcaaaatgccgcaaaaaagggaataagggcgacacggaaatgttgaatactcatactcttcctttttcaatattattgaagcatttatcagggttattgtctcatgagcggatacatatttgaatgtatttagaaaaataaacaaataggggttccgcgcacatttccccgaaaagtgccacctgacgtctaagaaaccattattatcatgacattaacctataaaaataggcgtatcacgaggccctttcgtc

SEQ ID NO: 378 - DNA, 4259 bp, synthetic construct
  source 1..4259: mol_type = other DNA
tcgcgcgtttcggtgatgacggtgaaaacctctgacacatgcagctcccggagacggtcacagcttgtctgtaagcggatgccgggagcagacaagcccgtcagggcgcgtcagcgggtgttggcgggtgtcggggctggcttaactatgcggcatcagagcagattgtactgagagtgcaccatatgcggtgtgaaataccgcacagatgcgtaaggagaaaataccgcatcaggcgccattcgccattcaggctgcgcaactgttgggaagggcgatcggtgcgggcctcttcgctattacgccagctggcgaaagggggatgtgctgcaaggcgattaagttgggtaacgccagggttttcccagtcacgacgttgtaaaacgacggccagtgaattcgagctcggtacccggggaaaggcaagcgagagctgcgagtgagtgcggaaggagggccaggaggggtggcggctgggtggggagagagggtgcaagacgagcggcgcgtgtcgggagcctttgggctgcgggtgcgttacaggagagcaggcgggtaggagccttcgcgggggccgagctcggaaggcggacggctgtgcccgcccaggggatgcgcccgggccggccgcgaaggtgccttcttccgggggcccggacgaccctgacacggcacgcgcgcgcttcgcagcctcaaagactccggggcctcgtggtcactggcgcaggggatcggggcggggtgcccggagtgcggtgcctcgtggctgaagggcagctcttctccccgcagtgcagagcagagcgggcggaggaccccgggcgcgggcgcggacggcacgcggggcatgggggcaggtgccactggccgcgccatggacgggccgcgcctgctgctgttgctgcttctgggggtgtcccttggaggtgccaaggaggcatgccccacaggcctgtacacacacagcggtgagtgctgcaaagcctgcaacctgggcgagggtgtggcccagccttgtggagccaaccagaccgtgtgtgagccctgcctggacagcgtgacgttctccgacgtggtgagcgcgaccgagccgtgcaagccgtgcaccgagtgcgtggggctccagagcatgtcggcgccatgcgtggaggccgacgacgccgtgtgccgctgcgcctacggctactaccaggatgagacgactgggcgctgcgaggcgtgccgcgtgtgcgaggcgggctcgggcctcgtgttctcctgccaggacaagcagaacaccgtgtgcgaggagtgccccgacggcacgtattccgacgaggccaaccacgtggacccgtgcctgccctgcaccgtgtgcgaggacaccgagcgccagctccgcgagtgcacacgctgggccgacgccgagtgcgaggagatccctggccgttggattacacggtccacacccccagagggctcggacagcacagcccccagcacccaggagcctgaggcacctccagaacaagacctcatagccagcacggtggcaggtgtggtgaccacagtgatgggcagctcccagcccgtggtgacccgaggcaccaccgacaacctcatccctgtctattgctccatcctggctgctgtggttgtgggtcttgtggcctacatagccttcaagaggtggaacagccgcgccaagcgctcgggttcgggtgccaccaacttcagcctgctgaagcaggccggcgacgtggaggagaaccctggccctatgaacctggaaggcggcggccgaggcggagagttcggcatgagcgcggtgagctgcggcaacgggaagctccgccagtggctgatcgaccagatcgacagcggcaagtaccccgggctggtgtgggagaacgaggagaagagcatcttccgcatcccctggaagcacgcgggcaagcaggactacaaccgcgaggaggacgccgcgctcttcaaggtctccggcctcgggagtcctctagagtcgacctgcaggcatgcaagcttggcgtaatcatggtcatagctgtttcctgtgtgaaattgttatccgctcacaattccacacaacatacgagccggaagcataaagtgtaaagcctggggtgcctaatgagtgagctaactcacattaattgcgttgcgctcactgcccgctttccagtcgggaaacctgtcgtgccagctgcattaatgaatcggccaacgcgcggggagaggcggtttgcgtattgggcgctcttccgcttcctcgctcactgactcgctgcgctcggtcgttcggctgcggcgagcggtatcagctcactcaaaggcggtaatacggttatccacagaatcaggggataacgcaggaaagaacatgtgagcaaaaggccagcaaaaggccaggaaccgtaaaaaggccgcgttgctggcgtttttccataggctccgcccccctgacgagcatcacaaaaatcgacgctcaagtcagaggtggcgaaacccgacaggactataaagataccaggcgtttccccctggaagctccctcgtgcgctctcctgttccgaccctgccgcttaccggatacctgtccgcctttctcccttcgggaagcgtggcgctttctcatagctcacgctgtaggtatctcagttcggtgtaggtcgttcgctccaagctgggctgtgtgcacgaaccccccgttcagcccgaccgctgcgccttatccggtaactatcgtcttgagtccaacccggtaagacacgacttatcgccactggcagcagccactggtaacaggattagcagagcgaggtatgtaggcggtgctacagagttcttgaagtggtggcctaactacggctacactagaaggacagtatttggtatctgcgctctgctgaagccagttaccttcggaaaaagagttggtagctcttgatccggcaaacaaaccaccgctggtagcggtggtttttttgtttgcaagcagcagattacgcgcagaaaaaaaggatctcaagaagatcctttgatcttttctacggggtctgacgctcagtggaacgaaaactcacgttaagggattttggtcatgagattatcaaaaaggatcttcacctagatccttttaaattaaaaatgaagttttaaatcaatctaaagtatatatgagtaaacttggtctgacagttaccaatgcttaatcagtgaggcacctatctcagcgatctgtctatttcgttcatccatagttgcctgactccccgtcgtgtagataactacgatacgggagggcttaccatctggccccagtgctgcaatgataccgcgagacccacgctcaccggctccagatttatcagcaataaaccagccagccggaagggccgagcgcagaagtggtcctgcaactttatccgcctccatccagtctattaattgttgccgggaagctagagtaagtagttcgccagttaatagtttgcgcaacgttgttgccattgctacaggcatcgtggtgtcacgctcgtcgtttggtatggcttcattcagctccggttcccaacgatcaaggcgagttacatgatcccccatgttgtgcaaaaaagcggttagctccttcggtcctccgatcgttgtcagaagtaagttggccgcagtgttatcactcatggttatggcagcactgcataattctcttactgtcatgccatccgtaagatgcttttctgtgactggtgagtactcaaccaagtcattctgagaatagtgtatgcggcgaccgagttgctcttgcccggcgtcaatacgggataataccgcgccacatagcagaactttaaaagtgctcatcattggaaaacgttcttcggggcgaaaactctcaaggatcttaccgctgttgagatccagttcgatgtaacccactcgtgcacccaactgatcttcagcatcttttactttcaccagcgtttctgggtgagcaaaaacaggaaggcaaaatgccgcaaaaaagggaataagggcgacacggaaatgttgaatactcatactcttcctttttcaatattattgaagcatttatcagggttattgtctcatgagcggatacatatttgaatgtatttagaaaaataaacaaataggggttccgcgcacatttccccgaaaagtgccacctgacgtctaagaaaccattattatcatgacattaacctataaaaataggcgtatcacgaggccctttcgtc

SEQ ID NO: 379 - DNA, 4060 bp, synthetic construct
  source 1..4060: mol_type = other DNA
tcgcgcgtttcggtgatgacggtgaaaacctctgacacatgcagctcccggagacggtcacagcttgtctgtaagcggatgccgggagcagacaagcccgtcagggcgcgtcagcgggtgttggcgggtgtcggggctggcttaactatgcggcatcagagcagattgtactgagagtgcaccatatgcggtgtgaaataccgcacagatgcgtaaggagaaaataccgcatcaggcgccattcgccattcaggctgcgcaactgttgggaagggcgatcggtgcgggcctcttcgctattacgccagctggcgaaagggggatgtgctgcaaggcgattaagttgggtaacgccagggttttcccagtcacgacgttgtaaaacgacggccagtgaattcgagctcggtacccggggacgaggagcctcgatgtggatggccccgcgaagttaagttctgggctcgcgcttccactccgccgcgccttcctcccagtttccgtccgctcgccgcaccggcttcgttcccccaaatctcggaccgtcccttcgcgccccctccccgtccgcccccagtgctgcgttctccccctcttggctctcctgcggctgggggaggggcgggggtcaccatgggggcaggtgccactggccgcgccatggacgggccgcgcctgctgctgttgctgcttctgggggtgtcccttggaggtgccaaggaggcatgccccacaggcctgtacacacacagcggtgagtgctgcaaagcctgcaacctgggcgagggtgtggcccagccttgtggagccaaccagaccgtgtgtgagccctgcctggacagcgtgacgttctccgacgtggtgagcgcgaccgagccgtgcaagccgtgcaccgagtgcgtggggctccagagcatgtcggcgccatgcgtggaggccgacgacgccgtgtgccgctgcgcctacggctactaccaggatgagacgactgggcgctgcgaggcgtgccgcgtgtgcgaggcgggctcgggcctcgtgttctcctgccaggacaagcagaacaccgtgtgcgaggagtgccccgacggcacgtattccgacgaggccaaccacgtggacccgtgcctgccctgcaccgtgtgcgaggacaccgagcgccagctccgcgagtgcacacgctgggccgacgccgagtgcgaggagatccctggccgttggattacacggtccacacccccagagggctcggacagcacagcccccagcacccaggagcctgaggcacctccagaacaagacctcatagccagcacggtggcaggtgtggtgaccacagtgatgggcagctcccagcccgtggtgacccgaggcaccaccgacaacctcatccctgtctattgctccatcctggctgctgtggttgtgggtcttgtggcctacatagccttcaagaggtggaacagccgcgccaagcgctcgggttcgggtgccaccaacttcagcctgctgaagcaggccggcgacgtggaggagaaccctggccctatggccgaggcgcctcaggtggtggagatcgacccggacttcgagccgctgccccggccgcgctcgtgcacctggccgctgcccaggccggagtttagccagtccaactcggccacctccagcccggcgccgtcgggcagcgcggctgccaaccccgacgccgcggcgggcctgccctcggcctcggctgccgctgtcagcgccgacttcatgagcaacctgagcttgctggaggagagcgaggactttcctctagagtcgacctgcaggcatgcaagcttggcgtaatcatggtcatagctgtttcctgtgtgaaattgttatccgctcacaattccacacaacatacgagccggaagcataaagtgtaaagcctggggtgcctaatgagtgagctaactcacattaattgcgttgcgctcactgcccgctttccagtcgggaaacctgtcgtgccagctgcattaatgaatcggccaacgcgcggggagaggcggtttgcgtattgggcgctcttccgcttcctcgctcactgactcgctgcgctcggtcgttcggctgcggcgagcggtatcagctcactcaaaggcggtaatacggttatccacagaatcaggggataacgcaggaaagaacatgtgagcaaaaggccagcaaaaggccaggaaccgtaaaaaggccgcgttgctggcgtttttccataggctccgcccccctgacgagcatcacaaaaatcgacgctcaagtcagaggtggcgaaacccgacaggactataaagataccaggcgtttccccctggaagctccctcgtgcgctctcctgttccgaccctgccgcttaccggatacctgtccgcctttctcccttcgggaagcgtggcgctttctcatagctcacgctgtaggtatctcagttcggtgtaggtcgttcgctccaagctgggctgtgtgcacgaaccccccgttcagcccgaccgctgcgccttatccggtaactatcgtcttgagtccaacccggtaagacacgacttatcgccactggcagcagccactggtaacaggattagcagagcgaggtatgtaggcggtgctacagagttcttgaagtggtggcctaactacggctacactagaaggacagtatttggtatctgcgctctgctgaagccagttaccttcggaaaaagagttggtagctcttgatccggcaaacaaaccaccgctggtagcggtggtttttttgtttgcaagcagcagattacgcgcagaaaaaaaggatctcaagaagatcctttgatcttttctacggggtctgacgctcagtggaacgaaaactcacgttaagggattttggtcatgagattatcaaaaaggatcttcacctagatccttttaaattaaaaatgaagttttaaatcaatctaaagtatatatgagtaaacttggtctgacagttaccaatgcttaatcagtgaggcacctatctcagcgatctgtctatttcgttcatccatagttgcctgactccccgtcgtgtagataactacgatacgggagggcttaccatctggccccagtgctgcaatgataccgcgagacccacgctcaccggctccagatttatcagcaataaaccagccagccggaagggccgagcgcagaagtggtcctgcaactttatccgcctccatccagtctattaattgttgccgggaagctagagtaagtagttcgccagttaatagtttgcgcaacgttgttgccattgctacaggcatcgtggtgtcacgctcgtcgtttggtatggcttcattcagctccggttcccaacgatcaaggcgagttacatgatcccccatgttgtgcaaaaaagcggttagctccttcggtcctccgatcgttgtcagaagtaagttggccgcagtgttatcactcatggttatggcagcactgcataattctcttactgtcatgccatccgtaagatgcttttctgtgactggtgagtactcaaccaagtcattctgagaatagtgtatgcggcgaccgagttgctcttgcccggcgtcaatacgggataataccgcgccacatagcagaactttaaaagtgctcatcattggaaaacgttcttcggggcgaaaactctcaaggatcttaccgctgttgagatccagttcgatgtaacccactcgtgcacccaactgatcttcagcatcttttactttcaccagcgtttctgggtgagcaaaaacaggaaggcaaaatgccgcaaaaaagggaataagggcgacacggaaatgttgaatactcatactcttcctttttcaatattattgaagcatttatcagggttattgtctcatgagcggatacatatttgaatgtatttagaaaaataaacaaataggggttccgcgcacatttccccgaaaagtgccacctgacgtctaagaaaccattattatcatgacattaacctataaaaataggcgtatcacgaggccctttcgtc

SEQ ID NO: 380 - DNA, 4240 bp, synthetic construct
  source 1..4240: mol_type = other DNA
tcgcgcgtttcggtgatgacggtgaaaacctctgacacatgcagctcccggagacggtcacagcttgtctgtaagcggatgccgggagcagacaagcccgtcagggcgcgtcagcgggtgttggcgggtgtcggggctggcttaactatgcggcatcagagcagattgtactgagagtgcaccatatgcggtgtgaaataccgcacagatgcgtaaggagaaaataccgcatcaggcgccattcgccattcaggctgcgcaactgttgggaagggcgatcggtgcgggcctcttcgctattacgccagctggcgaaagggggatgtgctgcaaggcgattaagttgggtaacgccagggttttcccagtcacgacgttgtaaaacgacggccagtgaattcgagctcggtacccggggattgaattgggaatgacagtttcagacccgaaactaggggcatggcccactaatgaggggataagttgagtgaaagaaaatgacaactgtttacagattttggcaacatttaaaccaaggcccttctccttatgcacaacaactgctttaacagctgctttttttttctccccccctccctccccccatcttggaaatccttgtatcaggtttttgagtcatgggggcaggtgccactggccgcgccatggacgggccgcgcctgctgctgttgctgcttctgggggtgtcccttggaggtgccaaggaggcatgccccacaggcctgtacacacacagcggtgagtgctgcaaagcctgcaacctgggcgagggtgtggcccagccttgtggagccaaccagaccgtgtgtgagccctgcctggacagcgtgacgttctccgacgtggtgagcgcgaccgagccgtgcaagccgtgcaccgagtgcgtggggctccagagcatgtcggcgccatgcgtggaggccgacgacgccgtgtgccgctgcgcctacggctactaccaggatgagacgactgggcgctgcgaggcgtgccgcgtgtgcgaggcgggctcgggcctcgtgttctcctgccaggacaagcagaacaccgtgtgcgaggagtgccccgacggcacgtattccgacgaggccaaccacgtggacccgtgcctgccctgcaccgtgtgcgaggacaccgagcgccagctccgcgagtgcacacgctgggccgacgccgagtgcgaggagatccctggccgttggattacacggtccacacccccagagggctcggacagcacagcccccagcacccaggagcctgaggcacctccagaacaagacctcatagccagcacggtggcaggtgtggtgaccacagtgatgggcagctcccagcccgtggtgacccgaggcaccaccgacaacctcatccctgtctattgctccatcctggctgctgtggttgtgggtcttgtggcctacatagccttcaagaggtggaacagccgcgccaagcgctcgggttcgggtgccaccaacttcagcctgctgaagcaggccggcgacgtggaggagaaccctggccctatgatgcaagaatctggcactgagacaaaaagtaacggttcagccatccagaatgggtcgggcggcagcaaccacttactagagtgcggcggtcttcgggaggggcggtccaacggagagacgccggccgtggacatcggggcagctgacctcgcccacgcccagcagcagcagcaacaggtactgggctttggagtcttgggaggtggaggtggtgggtgcgaattttactgctgaattttacacttaatcgcgatctcgcgatcagtgttttgtgttcacctgtctgtccatctgtctttctgtctgtcagtggcatctcataaaccatcagccctctaggagtcccagcagttggcttaagagactaatttcaagcccttgggagttggaagtcctgcaggtccccttgtggggagcagttcctctagagtcgacctgcaggcatgcaagcttggcgtaatcatggtcatagctgtttcctgtgtgaaattgttatccgctcacaattccacacaacatacgagccggaagcataaagtgtaaagcctggggtgcctaatgagtgagctaactcacattaattgcgttgcgctcactgcccgctttccagtcgggaaacctgtcgtgccagctgcattaatgaatcggccaacgcgcggggagaggcggtttgcgtattgggcgctcttccgcttcctcgctcactgactcgctgcgctcggtcgttcggctgcggcgagcggtatcagctcactcaaaggcggtaatacggttatccacagaatcaggggataacgcaggaaagaacatgtgagcaaaaggccagcaaaaggccaggaaccgtaaaaaggccgcgttgctggcgtttttccataggctccgcccccctgacgagcatcacaaaaatcgacgctcaagtcagaggtggcgaaacccgacaggactataaagataccaggcgtttccccctggaagctccctcgtgcgctctcctgttccgaccctgccgcttaccggatacctgtccgcctttctcccttcgggaagcgtggcgctttctcatagctcacgctgtaggtatctcagttcggtgtaggtcgttcgctccaagctgggctgtgtgcacgaaccccccgttcagcccgaccgctgcgccttatccggtaactatcgtcttgagtccaacccggtaagacacgacttatcgccactggcagcagccactggtaacaggattagcagagcgaggtatgtaggcggtgctacagagttcttgaagtggtggcctaactacggctacactagaaggacagtatttggtatctgcgctctgctgaagccagttaccttcggaaaaagagttggtagctcttgatccggcaaacaaaccaccgctggtagcggtggtttttttgtttgcaagcagcagattacgcgcagaaaaaaaggatctcaagaagatcctttgatcttttctacggggtctgacgctcagtggaacgaaaactcacgttaagggattttggtcatgagattatcaaaaaggatcttcacctagatccttttaaattaaaaatgaagttttaaatcaatctaaagtatatatgagtaaacttggtctgacagttaccaatgcttaatcagtgaggcacctatctcagcgatctgtctatttcgttcatccatagttgcctgactccccgtcgtgtagataactacgatacgggagggcttaccatctggccccagtgctgcaatgataccgcgagacccacgctcaccggctccagatttatcagcaataaaccagccagccggaagggccgagcgcagaagtggtcctgcaactttatccgcctccatccagtctattaattgttgccgggaagctagagtaagtagttcgccagttaatagtttgcgcaacgttgttgccattgctacaggcatcgtggtgtcacgctcgtcgtttggtatggcttcattcagctccggttcccaacgatcaaggcgagttacatgatcccccatgttgtgcaaaaaagcggttagctccttcggtcctccgatcgttgtcagaagtaagttggccgcagtgttatcactcatggttatggcagcactgcataattctcttactgtcatgccatccgtaagatgcttttctgtgactggtgagtactcaaccaagtcattctgagaatagtgtatgcggcgaccgagttgctcttgcccggcgtcaatacgggataataccgcgccacatagcagaactttaaaagtgctcatcattggaaaacgttcttcggggcgaaaactctcaaggatcttaccgctgttgagatccagttcgatgtaacccactcgtgcacccaactgatcttcagcatcttttactttcaccagcgtttctgggtgagcaaaaacaggaaggcaaaatgccgcaaaaaagggaataagggcgacacggaaatgttgaatactcatactcttcctttttcaatattattgaagcatttatcagggttattgtctcatgagcggatacatatttgaatgtatttagaaaaataaacaaataggggttccgcgcacatttccccgaaaagtgccacctgacgtctaagaaaccattattatcatgacattaacctataaaaataggcgtatcacgaggccctttcgtc

SEQ ID NO: 381 - DNA, 4295 bp, synthetic construct
  source 1..4295: mol_type = other DNA
tcgcgcgtttcggtgatgacggtgaaaacctctgacacatgcagctcccggagacggtcacagcttgtctgtaagcggatgccgggagcagacaagcccgtcagggcgcgtcagcgggtgttggcgggtgtcggggctggcttaactatgcggcatcagagcagattgtactgagagtgcaccatatgcggtgtgaaataccgcacagatgcgtaaggagaaaataccgcatcaggcgccattcgccattcaggctgcgcaactgttgggaagggcgatcggtgcgggcctcttcgctattacgccagctggcgaaagggggatgtgctgcaaggcgattaagttgggtaacgccagggttttcccagtcacgacgttgtaaaacgacggccagtgaattcgagctcggtacccggggacttgcccggctaatttttgtatttttagtagagacagggtttcaccatgttggtcaggctggtctcaaactcttgacctcaggtgattcgtctgcctcgacctcccaaagtgctgggattacaggcatgagccacacgcctggccacgacgggtgcttctttatgtagtctagtcaaagaagacctctcaaaggaggctgcagttgagcagaaacttgaaggaagggtgtgagcatgtgtagggtggtgggattagcaggtgcaaaggccctggggctggactgagctggcaccgaggagtgcagaccatgcacactgagggggcgggcccagcctgcctctaggggcagcgaggcctgggatgtgtatttacgtgtgctctctctttctcctctcccaccagggcttccttcctcggctccaccctgtggatgtaatgggggcaggtgccactggccgcgccatggacgggccgcgcctgctgctgttgctgcttctgggggtgtcccttggaggtgccaaggaggcatgccccacaggcctgtacacacacagcggtgagtgctgcaaagcctgcaacctgggcgagggtgtggcccagccttgtggagccaaccagaccgtgtgtgagccctgcctggacagcgtgacgttctccgacgtggtgagcgcgaccgagccgtgcaagccgtgcaccgagtgcgtggggctccagagcatgtcggcgccatgcgtggaggccgacgacgccgtgtgccgctgcgcctacggctactaccaggatgagacgactgggcgctgcgaggcgtgccgcgtgtgcgaggcgggctcgggcctcgtgttctcctgccaggacaagcagaacaccgtgtgcgaggagtgccccgacggcacgtattccgacgaggccaaccacgtggacccgtgcctgccctgcaccgtgtgcgaggacaccgagcgccagctccgcgagtgcacacgctgggccgacgccgagtgcgaggagatccctggccgttggattacacggtccacacccccagagggctcggacagcacagcccccagcacccaggagcctgaggcacctccagaacaagacctcatagccagcacggtggcaggtgtggtgaccacagtgatgggcagctcccagcccgtggtgacccgaggcaccaccgacaacctcatccctgtctattgctccatcctggctgctgtggttgtgggtcttgtggcctacatagccttcaagaggtggaacagccgcgccaagcgctcgggttcgggtgccaccaacttcagcctgctgaagcaggccggcgacgtggaggagaaccccggccccatggcagcacctgctctgtcctggcgtctgcccctcctcatcctcctcctgcccctggctacctcttgggcatctgcagcggtgaatggtgaggaccctgacatctgaacagctctgctttccctatggagagatggctaaggccctgctaaagcctcttcccagaaggggatggggccagagaccaggtgtccacctcctgcctcaccctctgtcctggacccctgccctggcatgcatgcatgaatgcgcgcacacacatcctctagagtcgacctgcaggcatgcaagcttggcgtaatcatggtcatagctgtttcctgtgtgaaattgttatccgctcacaattccacacaacatacgagccggaagcataaagtgtaaagcctggggtgcctaatgagtgagctaactcacattaattgcgttgcgctcactgcccgctttccagtcgggaaacctgtcgtgccagctgcattaatgaatcggccaacgcgcggggagaggcggtttgcgtattgggcgctcttccgcttcctcgctcactgactcgctgcgctcggtcgttcggctgcggcgagcggtatcagctcactcaaaggcggtaatacggttatccacagaatcaggggataacgcaggaaagaacatgtgagcaaaaggccagcaaaaggccaggaaccgtaaaaaggccgcgttgctggcgtttttccataggctccgcccccctgacgagcatcacaaaaatcgacgctcaagtcagaggtggcgaaacccgacaggactataaagataccaggcgtttccccctggaagctccctcgtgcgctctcctgttccgaccctgccgcttaccggatacctgtccgcctttctcccttcgggaagcgtggcgctttctcatagctcacgctgtaggtatctcagttcggtgtaggtcgttcgctccaagctgggctgtgtgcacgaaccccccgttcagcccgaccgctgcgccttatccggtaactatcgtcttgagtccaacccggtaagacacgacttatcgccactggcagcagccactggtaacaggattagcagagcgaggtatgtaggcggtgctacagagttcttgaagtggtggcctaactacggctacactagaaggacagtatttggtatctgcgctctgctgaagccagttaccttcggaaaaagagttggtagctcttgatccggcaaacaaaccaccgctggtagcggtggtttttttgtttgcaagcagcagattacgcgcagaaaaaaaggatctcaagaagatcctttgatcttttctacggggtctgacgctcagtggaacgaaaactcacgttaagggattttggtcatgagattatcaaaaaggatcttcacctagatccttttaaattaaaaatgaagttttaaatcaatctaaagtatatatgagtaaacttggtctgacagttaccaatgcttaatcagtgaggcacctatctcagcgatctgtctatttcgttcatccatagttgcctgactccccgtcgtgtagataactacgatacgggagggcttaccatctggccccagtgctgcaatgataccgcgagacccacgctcaccggctccagatttatcagcaataaaccagccagccggaagggccgagcgcagaagtggtcctgcaactttatccgcctccatccagtctattaattgttgccgggaagctagagtaagtagttcgccagttaatagtttgcgcaacgttgttgccattgctacaggcatcgtggtgtcacgctcgtcgtttggtatggcttcattcagctccggttcccaacgatcaaggcgagttacatgatcccccatgttgtgcaaaaaagcggttagctccttcggtcctccgatcgttgtcagaagtaagttggccgcagtgttatcactcatggttatggcagcactgcataattctcttactgtcatgccatccgtaagatgcttttctgtgactggtgagtactcaaccaagtcattctgagaatagtgtatgcggcgaccgagttgctcttgcccggcgtcaatacgggataataccgcgccacatagcagaactttaaaagtgctcatcattggaaaacgttcttcggggcgaaaactctcaaggatcttaccgctgttgagatccagttcgatgtaacccactcgtgcacccaactgatcttcagcatcttttactttcaccagcgtttctgggtgagcaaaaacaggaaggcaaaatgccgcaaaaaagggaataagggcgacacggaaatgttgaatactcatactcttcctttttcaatattattgaagcatttatcagggttattgtctcatgagcggatacatatttgaatgtatttagaaaaataaacaaataggggttccgcgcacatttccccgaaaagtgccacctgacgtctaagaaaccattattatcatgacattaacctataaaaataggcgtatcacgaggccctttcgtc

SEQ ID NO: 382 - DNA, 4274 bp, synthetic construct
  source 1..4274: mol_type = other DNA
tcgcgcgtttcggtgatgacggtgaaaacctctgacacatgcagctcccggagacggtcacagcttgtctgtaagcggatgccgggagcagacaagcccgtcagggcgcgtcagcgggtgttggcgggtgtcggggctggcttaactatgcggcatcagagcagattgtactgagagtgcaccatatgcggtgtgaaataccgcacagatgcgtaaggagaaaataccgcatcaggcgccattcgccattcaggctgcgcaactgttgggaagggcgatcggtgcgggcctcttcgctattacgccagctggcgaaagggggatgtgctgcaaggcgattaagttgggtaacgccagggttttcccagtcacgacgttgtaaaacgacggccagtgaattcgagctcggtacccggggaaaacacttcctatatttgagatgagagaagagagtgctaggcagtttcctggctgaacacgccagcccaatacttaaagagagcaactcctgactccgatagagactggatggacccacaagggtgacagcccaggcggaccgatcttcccatcccacatcctccggcgcgatgccaaaaagaggctgacggcaactgggccttctgcagagaaagacctccgcttcactgccccggctggtcccaagggtcaggaagatgggggcaggtgccactggccgcgccatggacgggccgcgcctgctgctgttgctgcttctgggggtgtcccttggaggtgccaaggaggcatgccccacaggcctgtacacacacagcggtgagtgctgcaaagcctgcaacctgggcgagggtgtggcccagccttgtggagccaaccagaccgtgtgtgagccctgcctggacagcgtgacgttctccgacgtggtgagcgcgaccgagccgtgcaagccgtgcaccgagtgcgtggggctccagagcatgtcggcgccatgcgtggaggccgacgacgccgtgtgccgctgcgcctacggctactaccaggatgagacgactgggcgctgcgaggcgtgccgcgtgtgcgaggcgggctcgggcctcgtgttctcctgccaggacaagcagaacaccgtgtgcgaggagtgccccgacggcacgtattccgacgaggccaaccacgtggacccgtgcctgccctgcaccgtgtgcgaggacaccgagcgccagctccgcgagtgcacacgctgggccgacgccgagtgcgaggagatccctggccgttggattacacggtccacacccccagagggctcggacagcacagcccccagcacccaggagcctgaggcacctccagaacaagacctcatagccagcacggtggcaggtgtggtgaccacagtgatgggcagctcccagcccgtggtgacccgaggcaccaccgacaacctcatccctgtctattgctccatcctggctgctgtggttgtgggtcttgtggcctacatagccttcaagaggtggaacagccgcgccaagcgctcgggttcgggtgccaccaacttcagcctgctgaagcaggccggcgacgtggaggagaaccccggccccatggattcatatctgctgatgtggggactgctcacgttcatcatggtgcctggctgccaggcaggtaagggcctgtgggtgcccccggaattccgggaaggctgatgggcatccctcttcccagccacagaaccagagggagtccccaggtagatggttccaagaagggagttgaatcttgggttccacctcttgcctgtgacccacggggaccccagtttatgcctcactgttccttggtctgtcaagagagcctgaaatagcattaggttctcctgtccttctcagtccttgacaattaattctgggaagaatagtgtggcatgatatttgggatatttggatgttaacagggtcccgatgagcaggtttctcaagaaattatcttttattcttcaatgaatttccttttattctctcctctagagtcgacctgcaggcatgcaagcttggcgtaatcatggtcatagctgtttcctgtgtgaaattgttatccgctcacaattccacacaacatacgagccggaagcataaagtgtaaagcctggggtgcctaatgagtgagctaactcacattaattgcgttgcgctcactgcccgctttccagtcgggaaacctgtcgtgccagctgcattaatgaatcggccaacgcgcggggagaggcggtttgcgtattgggcgctcttccgcttcctcgctcactgactcgctgcgctcggtcgttcggctgcggcgagcggtatcagctcactcaaaggcggtaatacggttatccacagaatcaggggataacgcaggaaagaacatgtgagcaaaaggccagcaaaaggccaggaaccgtaaaaaggccgcgttgctggcgtttttccataggctccgcccccctgacgagcatcacaaaaatcgacgctcaagtcagaggtggcgaaacccgacaggactataaagataccaggcgtttccccctggaagctccctcgtgcgctctcctgttccgaccctgccgcttaccggatacctgtccgcctttctcccttcgggaagcgtggcgctttctcatagctcacgctgtaggtatctcagttcggtgtaggtcgttcgctccaagctgggctgtgtgcacgaaccccccgttcagcccgaccgctgcgccttatccggtaactatcgtcttgagtccaacccggtaagacacgacttatcgccactggcagcagccactggtaacaggattagcagagcgaggtatgtaggcggtgctacagagttcttgaagtggtggcctaactacggctacactagaaggacagtatttggtatctgcgctctgctgaagccagttaccttcggaaaaagagttggtagctcttgatccggcaaacaaaccaccgctggtagcggtggtttttttgtttgcaagcagcagattacgcgcagaaaaaaaggatctcaagaagatcctttgatcttttctacggggtctgacgctcagtggaacgaaaactcacgttaagggattttggtcatgagattatcaaaaaggatcttcacctagatccttttaaattaaaaatgaagttttaaatcaatctaaagtatatatgagtaaacttggtctgacagttaccaatgcttaatcagtgaggcacctatctcagcgatctgtctatttcgttcatccatagttgcctgactccccgtcgtgtagataactacgatacgggagggcttaccatctggccccagtgctgcaatgataccgcgagacccacgctcaccggctccagatttatcagcaataaaccagccagccggaagggccgagcgcagaagtggtcctgcaactttatccgcctccatccagtctattaattgttgccgggaagctagagtaagtagttcgccagttaatagtttgcgcaacgttgttgccattgctacaggcatcgtggtgtcacgctcgtcgtttggtatggcttcattcagctccggttcccaacgatcaaggcgagttacatgatcccccatgttgtgcaaaaaagcggttagctccttcggtcctccgatcgttgtcagaagtaagttggccgcagtgttatcactcatggttatggcagcactgcataattctcttactgtcatgccatccgtaagatgcttttctgtgactggtgagtactcaaccaagtcattctgagaatagtgtatgcggcgaccgagttgctcttgcccggcgtcaatacgggataataccgcgccacatagcagaactttaaaagtgctcatcattggaaaacgttcttcggggcgaaaactctcaaggatcttaccgctgttgagatccagttcgatgtaacccactcgtgcacccaactgatcttcagcatcttttactttcaccagcgtttctgggtgagcaaaaacaggaaggcaaaatgccgcaaaaaagggaataagggcgacacggaaatgttgaatactcatactcttcctttttcaatattattgaagcatttatcagggttattgtctcatgagcggatacatatttgaatgtatttagaaaaataaacaaataggggttccgcgcacatttccccgaaaagtgccacctgacgtctaagaaaccattattatcatgacattaacctataaaaataggcgtatcacgaggccctttcgtc

SEQ ID NO: 383 - DNA, 4672 bp, synthetic construct
  source 1..4672: mol_type = other DNA
tcgcgcgtttcggtgatgacggtgaaaacctctgacacatgcagctcccggagacggtcacagcttgtctgtaagcggatgccgggagcagacaagcccgtcagggcgcgtcagcgggtgttggcgggtgtcggggctggcttaactatgcggcatcagagcagattgtactgagagtgcaccatatgcggtgtgaaataccgcacagatgcgtaaggagaaaataccgcatcaggcgccattcgccattcaggctgcgcaactgttgggaagggcgatcggtgcgggcctcttcgctattacgccagctggcgaaagggggatgtgctgcaaggcgattaagttgggtaacgccagggttttcccagtcacgacgttgtaaaacgacggccagtgaattcgagctcggtacccggggataataattttgtttgtttcttgtcctatttcaaaggctttcttatctctggagcacctagcataagatagaaatgtgtcaaaatatatgttttattcatcatgtgagtatttttaggtcctgttaacccccataactattgattcagagaagtagggtggttctgaaaaatacaggcataatctctttaacttgttttataggaaccagaataagggtaatgttttcctctgtcttcaaaatcatcaataatccatgcattgtttaactcatgtcataagcaataatgcctttcatatagccattggcatcaaagaagaaacacccccttgatttgatggtaagcgtgacactacataaactcccagaaaacccacttcctttccagcaaatagaaaacaaccgagagcctgaattcactgtcagctttgaacactgaacgcgaggactgttaactgtttctggcaaacatgggggcaggtgccactggccgcgccatggacgggccgcgcctgctgctgttgctgcttctgggggtgtcccttggaggtgccaaggaggcatgccccacaggcctgtacacacacagcggtgagtgctgcaaagcctgcaacctgggcgagggtgtggcccagccttgtggagccaaccagaccgtgtgtgagccctgcctggacagcgtgacgttctccgacgtggtgagcgcgaccgagccgtgcaagccgtgcaccgagtgcgtggggctccagagcatgtcggcgccatgcgtggaggccgacgacgccgtgtgccgctgcgcctacggctactaccaggatgagacgactgggcgctgcgaggcgtgccgcgtgtgcgaggcgggctcgggcctcgtgttctcctgccaggacaagcagaacaccgtgtgcgaggagtgccccgacggcacgtattccgacgaggccaaccacgtggacccgtgcctgccctgcaccgtgtgcgaggacaccgagcgccagctccgcgagtgcacacgctgggccgacgccgagtgcgaggagatccctggccgttggattacacggtccacacccccagagggctcggacagcacagcccccagcacccaggagcctgaggcacctccagaacaagacctcatagccagcacggtggcaggtgtggtgaccacagtgatgggcagctcccagcccgtggtgacccgaggcaccaccgacaacctcatccctgtctattgctccatcctggctgctgtggttgtgggtcttgtggcctacatagccttcaagaggtggaacagccgcgccaagcgctcgggttcgggtgccaccaacttcagcctgctgaagcaggccggcgacgtggaggagaaccccggccccatgaagtcaggactctggtatttctttctcttctgcttgcgcattaaagttttaacaggtaagtggtgtattgaatatttcttattaagttataattcaagtaaacattaagaaaaagcaaaggtagaaaaattacgcacccaaaagacagtggttttggtttttgaaagtaggaatagtttcaggatatggccaagggcaccatgtcactcatgtcactgtggatggcattgagtttgcattgctgcctttgatactgtgtcttgagatgaaaaacatgtttcatcagaccattaaatttttaaattacctgcttggagttacctgtcagtggataaactagcagagtggcttactgttcttagagaaagatgaaaggcaaaatgacttgtgtcaacagaatgaaaattaaatagctctggcatttggactgggaattctttctgtggtagaaaataaaatgggaagtctttgaaaagaaggattttgattttaatcttacctggatgatctgttatctgaaatgtccagggcaccatagagtttttattgacactaagtatcagagttcaccctaaaaagccaaggaggaaaggataatgtaatcctctagagtcgacctgcaggcatgcaagcttggcgtaatcatggtcatagctgtttcctgtgtgaaattgttatccgctcacaattccacacaacatacgagccggaagcataaagtgtaaagcctggggtgcctaatgagtgagctaactcacattaattgcgttgcgctcactgcccgctttccagtcgggaaacctgtcgtgccagctgcattaatgaatcggccaacgcgcggggagaggcggtttgcgtattgggcgctcttccgcttcctcgctcactgactcgctgcgctcggtcgttcggctgcggcgagcggtatcagctcactcaaaggcggtaatacggttatccacagaatcaggggataacgcaggaaagaacatgtgagcaaaaggccagcaaaaggccaggaaccgtaaaaaggccgcgttgctggcgtttttccataggctccgcccccctgacgagcatcacaaaaatcgacgctcaagtcagaggtggcgaaacccgacaggactataaagataccaggcgtttccccctggaagctccctcgtgcgctctcctgttccgaccctgccgcttaccggatacctgtccgcctttctcccttcgggaagcgtggcgctttctcatagctcacgctgtaggtatctcagttcggtgtaggtcgttcgctccaagctgggctgtgtgcacgaaccccccgttcagcccgaccgctgcgccttatccggtaactatcgtcttgagtccaacccggtaagacacgacttatcgccactggcagcagccactggtaacaggattagcagagcgaggtatgtaggcggtgctacagagttcttgaagtggtggcctaactacggctacactagaaggacagtatttggtatctgcgctctgctgaagccagttaccttcggaaaaagagttggtagctcttgatccggcaaacaaaccaccgctggtagcggtggtttttttgtttgcaagcagcagattacgcgcagaaaaaaaggatctcaagaagatcctttgatcttttctacggggtctgacgctcagtggaacgaaaactcacgttaagggattttggtcatgagattatcaaaaaggatcttcacctagatccttttaaattaaaaatgaagttttaaatcaatctaaagtatatatgagtaaacttggtctgacagttaccaatgcttaatcagtgaggcacctatctcagcgatctgtctatttcgttcatccatagttgcctgactccccgtcgtgtagataactacgatacgggagggcttaccatctggccccagtgctgcaatgataccgcgagacccacgctcaccggctccagatttatcagcaataaaccagccagccggaagggccgagcgcagaagtggtcctgcaactttatccgcctccatccagtctattaattgttgccgggaagctagagtaagtagttcgccagttaatagtttgcgcaacgttgttgccattgctacaggcatcgtggtgtcacgctcgtcgtttggtatggcttcattcagctccggttcccaacgatcaaggcgagttacatgatcccccatgttgtgcaaaaaagcggttagctccttcggtcctccgatcgttgtcagaagtaagttggccgcagtgttatcactcatggttatggcagcactgcataattctcttactgtcatgccatccgtaagatgcttttctgtgactggtgagtactcaaccaagtcattctgagaatagtgtatgcggcgaccgagttgctcttgcccggcgtcaatacgggataataccgcgccacatagcagaactttaaaagtgctcatcattggaaaacgttcttcggggcgaaaactctcaaggatcttaccgctgttgagatccagttcgatgtaacccactcgtgcacccaactgatcttcagcatcttttactttcaccagcgtttctgggtgagcaaaaacaggaaggcaaaatgccgcaaaaaagggaataagggcgacacggaaatgttgaatactcatactcttcctttttcaatattattgaagcatttatcagggttattgtctcatgagcggatacatatttgaatgtatttagaaaaataaacaaataggggttccgcgcacatttccccgaaaagtgccacctgacgtctaagaaaccattattatcatgacattaacctataaaaataggcgtatcacgaggccctttcgtc

SEQ ID NO: 384 - DNA, 4705 bp, synthetic construct
  source 1..4705: mol_type = other DNA
tcgcgcgtttcggtgatgacggtgaaaacctctgacacatgcagctcccggagacggtcacagcttgtctgtaagcggatgccgggagcagacaagcccgtcagggcgcgtcagcgggtgttggcgggtgtcggggctggcttaactatgcggcatcagagcagattgtactgagagtgcaccatatgcggtgtgaaataccgcacagatgcgtaaggagaaaataccgcatcaggcgccattcgccattcaggctgcgcaactgttgggaagggcgatcggtgcgggcctcttcgctattacgccagctggcgaaagggggatgtgctgcaaggcgattaagttgggtaacgccagggttttcccagtcacgacgttgtaaaacgacggccagtgaattcgagctcggtacccggggacagctaagggtgggtattctggtttggattagatcagaggaaagacagctgtatatgtgcccacaggagccaagacggtattttccatcctcccaaaacagtagagctttgacagagatttaagggtgaccaagtcaaggaagaggcatggcatagaacggtgatgtcgggggtgggggttcagaacttccattatagaaggtaatgatttagaggagaaggtggttgagaatggtgctagtggtagtgaacagatccttcccaggatctaggtgggctgaggatttttgagtctgtgacactattgtatatccagctttagtttctgtttaccaccttacagcagcacctaatctcctagaggacttagcccgtgtcacacagcacatatttgccacaccctctgtaaagccctggtttataaggttctttccaccggaagctatgacagaggaaacgtgtgggtggggaggggtagtgggtgagggacccaggttcctgacacagacagactacacccagggaatgaagagcaagcgccatgggggcaggtgccactggccgcgccatggacgggccgcgcctgctgctgttgctgcttctgggggtgtcccttggaggtgccaaggaggcatgccccacaggcctgtacacacacagcggtgagtgctgcaaagcctgcaacctgggcgagggtgtggcccagccttgtggagccaaccagaccgtgtgtgagccctgcctggacagcgtgacgttctccgacgtggtgagcgcgaccgagccgtgcaagccgtgcaccgagtgcgtggggctccagagcatgtcggcgccatgcgtggaggccgacgacgccgtgtgccgctgcgcctacggctactaccaggatgagacgactgggcgctgcgaggcgtgccgcgtgtgcgaggcgggctcgggcctcgtgttctcctgccaggacaagcagaacaccgtgtgcgaggagtgccccgacggcacgtattccgacgaggccaaccacgtggacccgtgcctgccctgcaccgtgtgcgaggacaccgagcgccagctccgcgagtgcacacgctgggccgacgccgagtgcgaggagatccctggccgttggattacacggtccacacccccagagggctcggacagcacagcccccagcacccaggagcctgaggcacctccagaacaagacctcatagccagcacggtggcaggtgtggtgaccacagtgatgggcagctcccagcccgtggtgacccgaggcaccaccgacaacctcatccctgtctattgctccatcctggctgctgtggttgtgggtcttgtggcctacatagccttcaagaggtggaacagccgcgccaagcgctcgggttcgggtgccaccaacttcagcctgctgaagcaggccggcgacgtggaggagaaccccggccccatgttgaagccatcattaccattcacatccctcttattcctgcagctgcccctgctgggagtggggctgaacacgacaattctgacgcccaatgggaatgaagacaccacagctggtgggaaatctgggactggagggggctggtgagaagggtggctgtgggaaggggccgtacagagatctggtgcctgccactggccattacaatcatgtgggcagaattgaaaagtggagtgggaagggcaagggggagggttccctgcctcacgctacttcttctttctttcttgtttgtttgtttctttctttcttttgaggcagggtctcactatgttgcctaggctggtctcaaactcctggcctctagtgatcctcctgcctcagcctttcaaagcaccaggattacagacatgagccaccgtgcttggcctcctccttctgaccatcatttctctttccctccctgccttcattttctccccaatctagatttcttcctgaccactatgcccactgactccctcagtgtttccactctgcccctcccagaggttcagtgttttgtgtcctctagagtcgacctgcaggcatgcaagcttggcgtaatcatggtcatagctgtttcctgtgtgaaattgttatccgctcacaattccacacaacatacgagccggaagcataaagtgtaaagcctggggtgcctaatgagtgagctaactcacattaattgcgttgcgctcactgcccgctttccagtcgggaaacctgtcgtgccagctgcattaatgaatcggccaacgcgcggggagaggcggtttgcgtattgggcgctcttccgcttcctcgctcactgactcgctgcgctcggtcgttcggctgcggcgagcggtatcagctcactcaaaggcggtaatacggttatccacagaatcaggggataacgcaggaaagaacatgtgagcaaaaggccagcaaaaggccaggaaccgtaaaaaggccgcgttgctggcgtttttccataggctccgcccccctgacgagcatcacaaaaatcgacgctcaagtcagaggtggcgaaacccgacaggactataaagataccaggcgtttccccctggaagctccctcgtgcgctctcctgttccgaccctgccgcttaccggatacctgtccgcctttctcccttcgggaagcgtggcgctttctcatagctcacgctgtaggtatctcagttcggtgtaggtcgttcgctccaagctgggctgtgtgcacgaaccccccgttcagcccgaccgctgcgccttatccggtaactatcgtcttgagtccaacccggtaagacacgacttatcgccactggcagcagccactggtaacaggattagcagagcgaggtatgtaggcggtgctacagagttcttgaagtggtggcctaactacggctacactagaaggacagtatttggtatctgcgctctgctgaagccagttaccttcggaaaaagagttggtagctcttgatccggcaaacaaaccaccgctggtagcggtggtttttttgtttgcaagcagcagattacgcgcagaaaaaaaggatctcaagaagatcctttgatcttttctacggggtctgacgctcagtggaacgaaaactcacgttaagggattttggtcatgagattatcaaaaaggatcttcacctagatccttttaaattaaaaatgaagttttaaatcaatctaaagtatatatgagtaaacttggtctgacagttaccaatgcttaatcagtgaggcacctatctcagcgatctgtctatttcgttcatccatagttgcctgactccccgtcgtgtagataactacgatacgggagggcttaccatctggccccagtgctgcaatgataccgcgagacccacgctcaccggctccagatttatcagcaataaaccagccagccggaagggccgagcgcagaagtggtcctgcaactttatccgcctccatccagtctattaattgttgccgggaagctagagtaagtagttcgccagttaatagtttgcgcaacgttgttgccattgctacaggcatcgtggtgtcacgctcgtcgtttggtatggcttcattcagctccggttcccaacgatcaaggcgagttacatgatcccccatgttgtgcaaaaaagcggttagctccttcggtcctccgatcgttgtcagaagtaagttggccgcagtgttatcactcatggttatggcagcactgcataattctcttactgtcatgccatccgtaagatgcttttctgtgactggtgagtactcaaccaagtcattctgagaatagtgtatgcggcgaccgagttgctcttgcccggcgtcaatacgggataataccgcgccacatagcagaactttaaaagtgctcatcattggaaaacgttcttcggggcgaaaactctcaaggatcttaccgctgttgagatccagttcgatgtaacccactcgtgcacccaactgatcttcagcatcttttactttcaccagcgtttctgggtgagcaaaaacaggaaggcaaaatgccgcaaaaaagggaataagggcgacacggaaatgttgaatactcatactcttcctttttcaatattattgaagcatttatcagggttattgtctcatgagcggatacatatttgaatgtatttagaaaaataaacaaataggggttccgcgcacatttccccgaaaagtgccacctgacgtctaagaaaccattattatcatgacattaacctataaaaataggcgtatcacgaggccctttcgtc

SEQ ID NO: 385 - DNA, 4407 bp, synthetic construct
  source 1..4407: mol_type = other DNA
tcgcgcgtttcggtgatgacggtgaaaacctctgacacatgcagctcccggagacggtcacagcttgtctgtaagcggatgccgggagcagacaagcccgtcagggcgcgtcagcgggtgttggcgggtgtcggggctggcttaactatgcggcatcagagcagattgtactgagagtgcaccatatgcggtgtgaaataccgcacagatgcgtaaggagaaaataccgcatcaggcgccattcgccattcaggctgcgcaactgttgggaagggcgatcggtgcgggcctcttcgctattacgccagctggcgaaagggggatgtgctgcaaggcgattaagttgggtaacgccagggttttcccagtcacgacgttgtaaaacgacggccagtgaattcgagctcggtacccggggaaaaatgcaggtccgagcagttaactggctggggcaccattagcaagtcacttagcatctctggggccagtctgcaaagcgagggggcagccttaatgtgcctccagcctgaagtcctagaatgagcgcccggtgtcccaagctggggcgcgcaccccagatcggagggcgccgatgtacagacagcaaactcacccagtctagtgcatgccttcttaaacatcacgagactctaagaaaaggaaactgaaaacgggaaagtccctctctctaacctggcactgcgtcgctggcttggagacaggtgacggtccctgcgggccttgtcctgattggctgggcacgcgtttaatataagtggaggcgtcgcgctggcgggcattcctgaagctgacagcattcgggccgagatgggggcaggtgccactggccgcgccatggacgggccgcgcctgctgctgttgctgcttctgggggtgtcccttggaggtgccaaggaggcatgccccacaggcctgtacacacacagcggtgagtgctgcaaagcctgcaacctgggcgagggtgtggcccagccttgtggagccaaccagaccgtgtgtgagccctgcctggacagcgtgacgttctccgacgtggtgagcgcgaccgagccgtgcaagccgtgcaccgagtgcgtggggctccagagcatgtcggcgccatgcgtggaggccgacgacgccgtgtgccgctgcgcctacggctactaccaggatgagacgactgggcgctgcgaggcgtgccgcgtgtgcgaggcgggctcgggcctcgtgttctcctgccaggacaagcagaacaccgtgtgcgaggagtgccccgacggcacgtattccgacgaggccaaccacgtggacccgtgcctgccctgcaccgtgtgcgaggacaccgagcgccagctccgcgagtgcacacgctgggccgacgccgagtgcgaggagatccctggccgttggattacacggtccacacccccagagggctcggacagcacagcccccagcacccaggagcctgaggcacctccagaacaagacctcatagccagcacggtggcaggtgtggtgaccacagtgatgggcagctcccagcccgtggtgacccgaggcaccaccgacaacctcatccctgtctattgctccatcctggctgctgtggttgtgggtcttgtggcctacatagccttcaagaggtggaacagccgcgccaagcgctcgggttcgggtgccaccaacttcagcctgctgaagcaggccggcgacgtggaggagaaccccggcccctctcgctccgtcgccttagctgtgctcgcgctactctctctttctggcctggaggctatccagcgtgagtctctcctaccctcccgctctggtccttcctctcccgctctgcaccctctgtggccctcgctgtgctctctcgctccgtgacttcccttctccaagttctccttggtggcccgccgtggggctagtccagggctggatctcggggaagcggcggggtggcctgggagtggggaagggggtgcgcacccgggacgcgcgctacttgcccctttcggcggggagcaggggagacctttggcctacggcgacgggagggtcgggacaaagtttagggcgtcgataagcgtcagagcgccgaggttgggggagggtttctcttccgctctttcgctcctctagagtcgacctgcaggcatgcaagcttggcgtaatcatggtcatagctgtttcctgtgtgaaattgttatccgctcacaattccacacaacatacgagccggaagcataaagtgtaaagcctggggtgcctaatgagtgagctaactcacattaattgcgttgcgctcactgcccgctttccagtcgggaaacctgtcgtgccagctgcattaatgaatcggccaacgcgcggggagaggcggtttgcgtattgggcgctcttccgcttcctcgctcactgactcgctgcgctcggtcgttcggctgcggcgagcggtatcagctcactcaaaggcggtaatacggttatccacagaatcaggggataacgcaggaaagaacatgtgagcaaaaggccagcaaaaggccaggaaccgtaaaaaggccgcgttgctggcgtttttccataggctccgcccccctgacgagcatcacaaaaatcgacgctcaagtcagaggtggcgaaacccgacaggactataaagataccaggcgtttccccctggaagctccctcgtgcgctctcctgttccgaccctgccgcttaccggatacctgtccgcctttctcccttcgggaagcgtggcgctttctcatagctcacgctgtaggtatctcagttcggtgtaggtcgttcgctccaagctgggctgtgtgcacgaaccccccgttcagcccgaccgctgcgccttatccggtaactatcgtcttgagtccaacccggtaagacacgacttatcgccactggcagcagccactggtaacaggattagcagagcgaggtatgtaggcggtgctacagagttcttgaagtggtggcctaactacggctacactagaaggacagtatttggtatctgcgctctgctgaagccagttaccttcggaaaaagagttggtagctcttgatccggcaaacaaaccaccgctggtagcggtggtttttttgtttgcaagcagcagattacgcgcagaaaaaaaggatctcaagaagatcctttgatcttttctacggggtctgacgctcagtggaacgaaaactcacgttaagggattttggtcatgagattatcaaaaaggatcttcacctagatccttttaaattaaaaatgaagttttaaatcaatctaaagtatatatgagtaaacttggtctgacagttaccaatgcttaatcagtgaggcacctatctcagcgatctgtctatttcgttcatccatagttgcctgactccccgtcgtgtagataactacgatacgggagggcttaccatctggccccagtgctgcaatgataccgcgagacccacgctcaccggctccagatttatcagcaataaaccagccagccggaagggccgagcgcagaagtggtcctgcaactttatccgcctccatccagtctattaattgttgccgggaagctagagtaagtagttcgccagttaatagtttgcgcaacgttgttgccattgctacaggcatcgtggtgtcacgctcgtcgtttggtatggcttcattcagctccggttcccaacgatcaaggcgagttacatgatcccccatgttgtgcaaaaaagcggttagctccttcggtcctccgatcgttgtcagaagtaagttggccgcagtgttatcactcatggttatggcagcactgcataattctcttactgtcatgccatccgtaagatgcttttctgtgactggtgagtactcaaccaagtcattctgagaatagtgtatgcggcgaccgagttgctcttgcccggcgtcaatacgggataataccgcgccacatagcagaactttaaaagtgctcatcattggaaaacgttcttcggggcgaaaactctcaaggatcttaccgctgttgagatccagttcgatgtaacccactcgtgcacccaactgatcttcagcatcttttactttcaccagcgtttctgggtgagcaaaaacaggaaggcaaaatgccgcaaaaaagggaataagggcgacacggaaatgttgaatactcatactcttcctttttcaatattattgaagcatttatcagggttattgtctcatgagcggatacatatttgaatgtatttagaaaaataaacaaataggggttccgcgcacatttccccgaaaagtgccacctgacgtctaagaaaccattattatcatgacattaacctataaaaataggcgtatcacgaggccctttcgtc

SEQ ID NO: 386 - DNA, 4122 bp, synthetic construct
  source 1..4122: mol_type = other DNA
tcgcgcgtttcggtgatgacggtgaaaacctctgacacatgcagctcccggagacggtcacagcttgtctgtaagcggatgccgggagcagacaagcccgtcagggcgcgtcagcgggtgttggcgggtgtcggggctggcttaactatgcggcatcagagcagattgtactgagagtgcaccatatgcggtgtgaaataccgcacagatgcgtaaggagaaaataccgcatcaggcgccattcgccattcaggctgcgcaactgttgggaagggcgatcggtgcgggcctcttcgctattacgccagctggcgaaagggggatgtgctgcaaggcgattaagttgggtaacgccagggttttcccagtcacgacgttgtaaaacgacggccagtgaattcgagctcggtacccggggaggtttcgccatgttgactaggctggtttcgaattcctgagctcaggtgatccacccaccttggcttcctaaagtgctgagataacaggcatgagccaccacgtccggaggcccctacctttgcgtgatacctgctccttcccattattttgaagaaactgctgaatccacaggggaagtgaaactatgaggggagataaagtgttggggcagagttttgagagtgataaccacaagctaagtttagaggactgagagtttgagagtcctccctgaggacccacatgtccccctttatatcctattacagggcatgggggcaggtgccactggccgcgccatggacgggccgcgcctgctgctgttgctgcttctgggggtgtcccttggaggtgccaaggaggcatgccccacaggcctgtacacacacagcggtgagtgctgcaaagcctgcaacctgggcgagggtgtggcccagccttgtggagccaaccagaccgtgtgtgagccctgcctggacagcgtgacgttctccgacgtggtgagcgcgaccgagccgtgcaagccgtgcaccgagtgcgtggggctccagagcatgtcggcgccatgcgtggaggccgacgacgccgtgtgccgctgcgcctacggctactaccaggatgagacgactgggcgctgcgaggcgtgccgcgtgtgcgaggcgggctcgggcctcgtgttctcctgccaggacaagcagaacaccgtgtgcgaggagtgccccgacggcacgtattccgacgaggccaaccacgtggacccgtgcctgccctgcaccgtgtgcgaggacaccgagcgccagctccgcgagtgcacacgctgggccgacgccgagtgcgaggagatccctggccgttggattacacggtccacacccccagagggctcggacagcacagcccccagcacccaggagcctgaggcacctccagaacaagacctcatagccagcacggtggcaggtgtggtgaccacagtgatgggcagctcccagcccgtggtgacccgaggcaccaccgacaacctcatccctgtctattgctccatcctggctgctgtggttgtgggtcttgtggcctacatagccttcaagaggtggaacagccgcgccaagcgctcgggttcgggtgccaccaacttcagcctgctgaagcaggccggcgacgtggaggagaaccccggccccgtcgcattacctatggtccttgttttgctgctggtcctgagcagaggtgagagtgaattggacgccaagatcccatccacaggggatgccacagaatggcggaatcctcacctgtccatgctggggtcctgccagccagccccctcctgccagaagtgcatcctctcacaccccagctgtgcatggtgcaagcaactggtaaagatgggccttcctctagagtcgacctgcaggcatgcaagcttggcgtaatcatggtcatagctgtttcctgtgtgaaattgttatccgctcacaattccacacaacatacgagccggaagcataaagtgtaaagcctggggtgcctaatgagtgagctaactcacattaattgcgttgcgctcactgcccgctttccagtcgggaaacctgtcgtgccagctgcattaatgaatcggccaacgcgcggggagaggcggtttgcgtattgggcgctcttccgcttcctcgctcactgactcgctgcgctcggtcgttcggctgcggcgagcggtatcagctcactcaaaggcggtaatacggttatccacagaatcaggggataacgcaggaaagaacatgtgagcaaaaggccagcaaaaggccaggaaccgtaaaaaggccgcgttgctggcgtttttccataggctccgcccccctgacgagcatcacaaaaatcgacgctcaagtcagaggtggcgaaacccgacaggactataaagataccaggcgtttccccctggaagctccctcgtgcgctctcctgttccgaccctgccgcttaccggatacctgtccgcctttctcccttcgggaagcgtggcgctttctcatagctcacgctgtaggtatctcagttcggtgtaggtcgttcgctccaagctgggctgtgtgcacgaaccccccgttcagcccgaccgctgcgccttatccggtaactatcgtcttgagtccaacccggtaagacacgacttatcgccactggcagcagccactggtaacaggattagcagagcgaggtatgtaggcggtgctacagagttcttgaagtggtggcctaactacggctacactagaaggacagtatttggtatctgcgctctgctgaagccagttaccttcggaaaaagagttggtagctcttgatccggcaaacaaaccaccgctggtagcggtggtttttttgtttgcaagcagcagattacgcgcagaaaaaaaggatctcaagaagatcctttgatcttttctacggggtctgacgctcagtggaacgaaaactcacgttaagggattttggtcatgagattatcaaaaaggatcttcacctagatccttttaaattaaaaatgaagttttaaatcaatctaaagtatatatgagtaaacttggtctgacagttaccaatgcttaatcagtgaggcacctatctcagcgatctgtctatttcgttcatccatagttgcctgactccccgtcgtgtagataactacgatacgggagggcttaccatctggccccagtgctgcaatgataccgcgagacccacgctcaccggctccagatttatcagcaataaaccagccagccggaagggccgagcgcagaagtggtcctgcaactttatccgcctccatccagtctattaattgttgccgggaagctagagtaagtagttcgccagttaatagtttgcgcaacgttgttgccattgctacaggcatcgtggtgtcacgctcgtcgtttggtatggcttcattcagctccggttcccaacgatcaaggcgagttacatgatcccccatgttgtgcaaaaaagcggttagctccttcggtcctccgatcgttgtcagaagtaagttggccgcagtgttatcactcatggttatggcagcactgcataattctcttactgtcatgccatccgtaagatgcttttctgtgactggtgagtactcaaccaagtcattctgagaatagtgtatgcggcgaccgagttgctcttgcccggcgtcaatacgggataataccgcgccacatagcagaactttaaaagtgctcatcattggaaaacgttcttcggggcgaaaactctcaaggatcttaccgctgttgagatccagttcgatgtaacccactcgtgcacccaactgatcttcagcatcttttactttcaccagcgtttctgggtgagcaaaaacaggaaggcaaaatgccgcaaaaaagggaataagggcgacacggaaatgttgaatactcatactcttcctttttcaatattattgaagcatttatcagggttattgtctcatgagcggatacatatttgaatgtatttagaaaaataaacaaataggggttccgcgcacatttccccgaaaagtgccacctgacgtctaagaaaccattattatcatgacattaacctataaaaataggcgtatcacgaggccctttcgtc

SEQ ID NO: 387 - DNA, 4398 bp, synthetic construct
  source 1..4398: mol_type = other DNA
tcgcgcgtttcggtgatgacggtgaaaacctctgacacatgcagctcccggagacggtcacagcttgtctgtaagcggatgccgggagcagacaagcccgtcagggcgcgtcagcgggtgttggcgggtgtcggggctggcttaactatgcggcatcagagcagattgtactgagagtgcaccatatgcggtgtgaaataccgcacagatgcgtaaggagaaaataccgcatcaggcgccattcgccattcaggctgcgcaactgttgggaagggcgatcggtgcgggcctcttcgctattacgccagctggcgaaagggggatgtgctgcaaggcgattaagttgggtaacgccagggttttcccagtcacgacgttgtaaaacgacggccagtgaattcgagctcggtacccggggactaacactcatattttatagatgagaagatcgaagcccacaaagggaaggctctttgcccacagaaccagagccaggtctagagctgcaactaaatcctctgccactctaagagagctctcgctctactgccctgtctccctttgcctccccatccctctggctacagctcagctcttcccacccctgtgtctatcactgaaggagttacccccatctcaggcattgactcaggatgcccctggtttaaggtggtctggccatgagtggtggtggggacggtccctaggagggctatctatgggaggtccctggctgccccaggagataggccaagtttcttgggcacccctcagagtggccttatttttctcctccaggcaacctccaagtcccagatcatgggggcaggtgccactggccgcgccatggacgggccgcgcctgctgctgttgctgcttctgggggtgtcccttggaggtgccaaggaggcatgccccacaggcctgtacacacacagcggtgagtgctgcaaagcctgcaacctgggcgagggtgtggcccagccttgtggagccaaccagaccgtgtgtgagccctgcctggacagcgtgacgttctccgacgtggtgagcgcgaccgagccgtgcaagccgtgcaccgagtgcgtggggctccagagcatgtcggcgccatgcgtggaggccgacgacgccgtgtgccgctgcgcctacggctactaccaggatgagacgactgggcgctgcgaggcgtgccgcgtgtgcgaggcgggctcgggcctcgtgttctcctgccaggacaagcagaacaccgtgtgcgaggagtgccccgacggcacgtattccgacgaggccaaccacgtggacccgtgcctgccctgcaccgtgtgcgaggacaccgagcgccagctccgcgagtgcacacgctgggccgacgccgagtgcgaggagatccctggccgttggattacacggtccacacccccagagggctcggacagcacagcccccagcacccaggagcctgaggcacctccagaacaagacctcatagccagcacggtggcaggtgtggtgaccacagtgatgggcagctcccagcccgtggtgacccgaggcaccaccgacaacctcatccctgtctattgctccatcctggctgctgtggttgtgggtcttgtggcctacatagccttcaagaggtggaacagccgcgccaagcgctcgggttcgggtgccaccaacttcagcctgctgaagcaggccggcgacgtggaggagaaccccggcccctctctgtggggtctggtctccaagatgcccccagaaaaagtgcagcggctctatgtcgactttccccaacacctgcggcatcttctgggtgactggctggagagccagccctggtgagtcctggctgctccctgctggtcccccaagtcttccctaactcatcttccttctccttagatttttctcccctcacccatggattcagaacttgagacctgttattccatgtgtagtgacctagatttagcagggagtctgtgccccatcaagaccaggctatgaatgttgacagatggagaccccatctcttaggaggctgagccgaagaggaggggggtttgggctgggacaaaggcacttctcataacagctagaagactgggaaacaaggcgcatgggttcctctagagtcgacctgcaggcatgcaagcttggcgtaatcatggtcatagctgtttcctgtgtgaaattgttatccgctcacaattccacacaacatacgagccggaagcataaagtgtaaagcctggggtgcctaatgagtgagctaactcacattaattgcgttgcgctcactgcccgctttccagtcgggaaacctgtcgtgccagctgcattaatgaatcggccaacgcgcggggagaggcggtttgcgtattgggcgctcttccgcttcctcgctcactgactcgctgcgctcggtcgttcggctgcggcgagcggtatcagctcactcaaaggcggtaatacggttatccacagaatcaggggataacgcaggaaagaacatgtgagcaaaaggccagcaaaaggccaggaaccgtaaaaaggccgcgttgctggcgtttttccataggctccgcccccctgacgagcatcacaaaaatcgacgctcaagtcagaggtggcgaaacccgacaggactataaagataccaggcgtttccccctggaagctccctcgtgcgctctcctgttccgaccctgccgcttaccggatacctgtccgcctttctcccttcgggaagcgtggcgctttctcatagctcacgctgtaggtatctcagttcggtgtaggtcgttcgctccaagctgggctgtgtgcacgaaccccccgttcagcccgaccgctgcgccttatccggtaactatcgtcttgagtccaacccggtaagacacgacttatcgccactggcagcagccactggtaacaggattagcagagcgaggtatgtaggcggtgctacagagttcttgaagtggtggcctaactacggctacactagaaggacagtatttggtatctgcgctctgctgaagccagttaccttcggaaaaagagttggtagctcttgatccggcaaacaaaccaccgctggtagcggtggtttttttgtttgcaagcagcagattacgcgcagaaaaaaaggatctcaagaagatcctttgatcttttctacggggtctgacgctcagtggaacgaaaactcacgttaagggattttggtcatgagattatcaaaaaggatcttcacctagatccttttaaattaaaaatgaagttttaaatcaatctaaagtatatatgagtaaacttggtctgacagttaccaatgcttaatcagtgaggcacctatctcagcgatctgtctatttcgttcatccatagttgcctgactccccgtcgtgtagataactacgatacgggagggcttaccatctggccccagtgctgcaatgataccgcgagacccacgctcaccggctccagatttatcagcaataaaccagccagccggaagggccgagcgcagaagtggtcctgcaactttatccgcctccatccagtctattaattgttgccgggaagctagagtaagtagttcgccagttaatagtttgcgcaacgttgttgccattgctacaggcatcgtggtgtcacgctcgtcgtttggtatggcttcattcagctccggttcccaacgatcaaggcgagttacatgatcccccatgttgtgcaaaaaagcggttagctccttcggtcctccgatcgttgtcagaagtaagttggccgcagtgttatcactcatggttatggcagcactgcataattctcttactgtcatgccatccgtaagatgcttttctgtgactggtgagtactcaaccaagtcattctgagaatagtgtatgcggcgaccgagttgctcttgcccggcgtcaatacgggataataccgcgccacatagcagaactttaaaagtgctcatcattggaaaacgttcttcggggcgaaaactctcaaggatcttaccgctgttgagatccagttcgatgtaacccactcgtgcacccaactgatcttcagcatcttttactttcaccagcgtttctgggtgagcaaaaacaggaaggcaaaatgccgcaaaaaagggaataagggcgacacggaaatgttgaatactcatactcttcctttttcaatattattgaagcatttatcagggttattgtctcatgagcggatacatatttgaatgtatttagaaaaataaacaaataggggttccgcgcacatttccccgaaaagtgccacctgacgtctaagaaaccattattatcatgacattaacctataaaaataggcgtatcacgaggccctttcgtc

SEQ ID NO: 388 - DNA, 4398 bp, synthetic construct
  source 1..4398: mol_type = other DNA
tcgcgcgtttcggtgatgacggtgaaaacctctgacacatgcagctcccggagacggtcacagcttgtctgtaagcggatgccgggagcagacaagcccgtcagggcgcgtcagcgggtgttggcgggtgtcggggctggcttaactatgcggcatcagagcagattgtactgagagtgcaccatatgcggtgtgaaataccgcacagatgcgtaaggagaaaataccgcatcaggcgccattcgccattcaggctgcgcaactgttgggaagggcgatcggtgcgggcctcttcgctattacgccagctggcgaaagggggatgtgctgcaaggcgattaagttgggtaacgccagggttttcccagtcacgacgttgtaaaacgacggccagtgaattcgagctcggtacccggggaacgcctgtcctcagcccagccctcagctgcagccaggccttcagcctccgtaacccccgctcagggtccccaccccctgcagccctgtccctccaggatgcatggccttgtcctgtgtgggggtggccgagagcactgccccagccctgggtaccttgggcaggaagctggcagaggccagggctgccattcaaacaggggcaggtggttttgccaggaggaagttgacagttcaacttcaaacatgggtgacgcaggccccacactgcctgctccccgtcccacccctccctgagcacgccaccccgccctctccctctctgagagcgagatacccggccagacaccctcacctgcggtgcccagctgcccaggctgaggcaagagaaggccagaaaccatgggggcaggtgccactggccgcgccatggacgggccgcgcctgctgctgttgctgcttctgggggtgtcccttggaggtgccaaggaggcatgccccacaggcctgtacacacacagcggtgagtgctgcaaagcctgcaacctgggcgagggtgtggcccagccttgtggagccaaccagaccgtgtgtgagccctgcctggacagcgtgacgttctccgacgtggtgagcgcgaccgagccgtgcaagccgtgcaccgagtgcgtggggctccagagcatgtcggcgccatgcgtggaggccgacgacgccgtgtgccgctgcgcctacggctactaccaggatgagacgactgggcgctgcgaggcgtgccgcgtgtgcgaggcgggctcgggcctcgtgttctcctgccaggacaagcagaacaccgtgtgcgaggagtgccccgacggcacgtattccgacgaggccaaccacgtggacccgtgcctgccctgcaccgtgtgcgaggacaccgagcgccagctccgcgagtgcacacgctgggccgacgccgagtgcgaggagatccctggccgttggattacacggtccacacccccagagggctcggacagcacagcccccagcacccaggagcctgaggcacctccagaacaagacctcatagccagcacggtggcaggtgtggtgaccacagtgatgggcagctcccagcccgtggtgacccgaggcaccaccgacaacctcatccctgtctattgctccatcctggctgctgtggttgtgggtcttgtggcctacatagccttcaagaggtggaacagccgcgccaagcgctcgggttcgggtgccaccaacttcagcctgctgaagcaggccggcgacgtggaggagaaccccggcccccccatggggtctctgcaaccgctggccaccttgtacctgctggggatgctgggtgagtacccctcccaggtgtcctgcgaacacccgggctcgctccagtgcaaggaaggagttcccagttttacccaaggctgactctgggatccacatgtcagccctctggagcgttgtggagatttggggccactgggatccctgcctgcccccactaagccgcagcttggccctctgtcctgcatgtcccacccgccaggagcacaaccttgcctctctcatgcgctgttgagaaccctgctttacccttccagtgcaagagagactgcaggggggacccgcatttgatggggcccagacaacttgattcctaggctgagttggattttagcagagcattcaggcctcctctagagtcgacctgcaggcatgcaagcttggcgtaatcatggtcatagctgtttcctgtgtgaaattgttatccgctcacaattccacacaacatacgagccggaagcataaagtgtaaagcctggggtgcctaatgagtgagctaactcacattaattgcgttgcgctcactgcccgctttccagtcgggaaacctgtcgtgccagctgcattaatgaatcggccaacgcgcggggagaggcggtttgcgtattgggcgctcttccgcttcctcgctcactgactcgctgcgctcggtcgttcggctgcggcgagcggtatcagctcactcaaaggcggtaatacggttatccacagaatcaggggataacgcaggaaagaacatgtgagcaaaaggccagcaaaaggccaggaaccgtaaaaaggccgcgttgctggcgtttttccataggctccgcccccctgacgagcatcacaaaaatcgacgctcaagtcagaggtggcgaaacccgacaggactataaagataccaggcgtttccccctggaagctccctcgtgcgctctcctgttccgaccctgccgcttaccggatacctgtccgcctttctcccttcgggaagcgtggcgctttctcatagctcacgctgtaggtatctcagttcggtgtaggtcgttcgctccaagctgggctgtgtgcacgaaccccccgttcagcccgaccgctgcgccttatccggtaactatcgtcttgagtccaacccggtaagacacgacttatcgccactggcagcagccactggtaacaggattagcagagcgaggtatgtaggcggtgctacagagttcttgaagtggtggcctaactacggctacactagaaggacagtatttggtatctgcgctctgctgaagccagttaccttcggaaaaagagttggtagctcttgatccggcaaacaaaccaccgctggtagcggtggtttttttgtttgcaagcagcagattacgcgcagaaaaaaaggatctcaagaagatcctttgatcttttctacggggtctgacgctcagtggaacgaaaactcacgttaagggattttggtcatgagattatcaaaaaggatcttcacctagatccttttaaattaaaaatgaagttttaaatcaatctaaagtatatatgagtaaacttggtctgacagttaccaatgcttaatcagtgaggcacctatctcagcgatctgtctatttcgttcatccatagttgcctgactccccgtcgtgtagataactacgatacgggagggcttaccatctggccccagtgctgcaatgataccgcgagacccacgctcaccggctccagatttatcagcaataaaccagccagccggaagggccgagcgcagaagtggtcctgcaactttatccgcctccatccagtctattaattgttgccgggaagctagagtaagtagttcgccagttaatagtttgcgcaacgttgttgccattgctacaggcatcgtggtgtcacgctcgtcgtttggtatggcttcattcagctccggttcccaacgatcaaggcgagttacatgatcccccatgttgtgcaaaaaagcggttagctccttcggtcctccgatcgttgtcagaagtaagttggccgcagtgttatcactcatggttatggcagcactgcataattctcttactgtcatgccatccgtaagatgcttttctgtgactggtgagtactcaaccaagtcattctgagaatagtgtatgcggcgaccgagttgctcttgcccggcgtcaatacgggataataccgcgccacatagcagaactttaaaagtgctcatcattggaaaacgttcttcggggcgaaaactctcaaggatcttaccgctgttgagatccagttcgatgtaacccactcgtgcacccaactgatcttcagcatcttttactttcaccagcgtttctgggtgagcaaaaacaggaaggcaaaatgccgcaaaaaagggaataagggcgacacggaaatgttgaatactcatactcttcctttttcaatattattgaagcatttatcagggttattgtctcatgagcggatacatatttgaatgtatttagaaaaataaacaaataggggttccgcgcacatttccccgaaaagtgccacctgacgtctaagaaaccattattatcatgacattaacctataaaaataggcgtatcacgaggccctttcgtc

SEQ ID NO: 389 - DNA, 4398 bp, synthetic construct
  source 1..4398: mol_type = other DNA
tcgcgcgtttcggtgatgacggtgaaaacctctgacacatgcagctcccggagacggtcacagcttgtctgtaagcggatgccgggagcagacaagcccgtcagggcgcgtcagcgggtgttggcgggtgtcggggctggcttaactatgcggcatcagagcagattgtactgagagtgcaccatatgcggtgtgaaataccgcacagatgcgtaaggagaaaataccgcatcaggcgccattcgccattcaggctgcgcaactgttgggaagggcgatcggtgcgggcctcttcgctattacgccagctggcgaaagggggatgtgctgcaaggcgattaagttgggtaacgccagggttttcccagtcacgacgttgtaaaacgacggccagtgaattcgagctcggtacccggggaacttctctcacacatctctgactccccaacatctaacccatggcctggcatgtgatattcatgctataaatatttgttgaatcagtaaatggcccctcatctagattctgccaggcagcgcagggggctttttgaatgtaaatgacctaatgattcaggatcctatgaccagcgactgtcaccctctgtcacctttcttctgcccctttatctctgaaggcattgaaggggccctgcatgagtcagggagggctggggggaggagcaagggtgggaggggcagggaagagggtggcttctccgacaacttaaaaggggcttgaaccacttcctccccagacaggggtagtgcgaggccgggcacagccttcctgtgtggttttaccgcccagagagcgtcatgggggcaggtgccactggccgcgccatggacgggccgcgcctgctgctgttgctgcttctgggggtgtcccttggaggtgccaaggaggcatgccccacaggcctgtacacacacagcggtgagtgctgcaaagcctgcaacctgggcgagggtgtggcccagccttgtggagccaaccagaccgtgtgtgagccctgcctggacagcgtgacgttctccgacgtggtgagcgcgaccgagccgtgcaagccgtgcaccgagtgcgtggggctccagagcatgtcggcgccatgcgtggaggccgacgacgccgtgtgccgctgcgcctacggctactaccaggatgagacgactgggcgctgcgaggcgtgccgcgtgtgcgaggcgggctcgggcctcgtgttctcctgccaggacaagcagaacaccgtgtgcgaggagtgccccgacggcacgtattccgacgaggccaaccacgtggacccgtgcctgccctgcaccgtgtgcgaggacaccgagcgccagctccgcgagtgcacacgctgggccgacgccgagtgcgaggagatccctggccgttggattacacggtccacacccccagagggctcggacagcacagcccccagcacccaggagcctgaggcacctccagaacaagacctcatagccagcacggtggcaggtgtggtgaccacagtgatgggcagctcccagcccgtggtgacccgaggcaccaccgacaacctcatccctgtctattgctccatcctggctgctgtggttgtgggtcttgtggcctacatagccttcaagaggtggaacagccgcgccaagcgctcgggttcgggtgccaccaacttcagcctgctgaagcaggccggcgacgtggaggagaaccccggccccgacctgggtgagtgagcctcttcatgtgagaaggaacagtaccagggtcttggacacccagactgaccctgtggaatgggggtggaggatgcgggtggagcgcataggggtgcttcctggagaaatcagttctgatttggtgggcattggaagctacttccagagaatgccccctgctgtcccaggaggggtgcacctgccctttcagacctggagaaggggtcagcctttggtgccagtggggacaagggaggggccgagatcatgtctttctaaaacagcagggacataagagagtggcggggctgggcttggtggtctggcagaacctgttctcatcatgagggtgataggttaggccctctgggacctctggggacaggtttcaacagagaaattctcctctagagtcgacctgcaggcatgcaagcttggcgtaatcatggtcatagctgtttcctgtgtgaaattgttatccgctcacaattccacacaacatacgagccggaagcataaagtgtaaagcctggggtgcctaatgagtgagctaactcacattaattgcgttgcgctcactgcccgctttccagtcgggaaacctgtcgtgccagctgcattaatgaatcggccaacgcgcggggagaggcggtttgcgtattgggcgctcttccgcttcctcgctcactgactcgctgcgctcggtcgttcggctgcggcgagcggtatcagctcactcaaaggcggtaatacggttatccacagaatcaggggataacgcaggaaagaacatgtgagcaaaaggccagcaaaaggccaggaaccgtaaaaaggccgcgttgctggcgtttttccataggctccgcccccctgacgagcatcacaaaaatcgacgctcaagtcagaggtggcgaaacccgacaggactataaagataccaggcgtttccccctggaagctccctcgtgcgctctcctgttccgaccctgccgcttaccggatacctgtccgcctttctcccttcgggaagcgtggcgctttctcatagctcacgctgtaggtatctcagttcggtgtaggtcgttcgctccaagctgggctgtgtgcacgaaccccccgttcagcccgaccgctgcgccttatccggtaactatcgtcttgagtccaacccggtaagacacgacttatcgccactggcagcagccactggtaacaggattagcagagcgaggtatgtaggcggtgctacagagttcttgaagtggtggcctaactacggctacactagaaggacagtatttggtatctgcgctctgctgaagccagttaccttcggaaaaagagttggtagctcttgatccggcaaacaaaccaccgctggtagcggtggtttttttgtttgcaagcagcagattacgcgcagaaaaaaaggatctcaagaagatcctttgatcttttctacggggtctgacgctcagtggaacgaaaactcacgttaagggattttggtcatgagattatcaaaaaggatcttcacctagatccttttaaattaaaaatgaagttttaaatcaatctaaagtatatatgagtaaacttggtctgacagttaccaatgcttaatcagtgaggcacctatctcagcgatctgtctatttcgttcatccatagttgcctgactccccgtcgtgtagataactacgatacgggagggcttaccatctggccccagtgctgcaatgataccgcgagacccacgctcaccggctccagatttatcagcaataaaccagccagccggaagggccgagcgcagaagtggtcctgcaactttatccgcctccatccagtctattaattgttgccgggaagctagagtaagtagttcgccagttaatagtttgcgcaacgttgttgccattgctacaggcatcgtggtgtcacgctcgtcgtttggtatggcttcattcagctccggttcccaacgatcaaggcgagttacatgatcccccatgttgtgcaaaaaagcggttagctccttcggtcctccgatcgttgtcagaagtaagttggccgcagtgttatcactcatggttatggcagcactgcataattctcttactgtcatgccatccgtaagatgcttttctgtgactggtgagtactcaaccaagtcattctgagaatagtgtatgcggcgaccgagttgctcttgcccggcgtcaatacgggataataccgcgccacatagcagaactttaaaagtgctcatcattggaaaacgttcttcggggcgaaaactctcaaggatcttaccgctgttgagatccagttcgatgtaacccactcgtgcacccaactgatcttcagcatcttttactttcaccagcgtttctgggtgagcaaaaacaggaaggcaaaatgccgcaaaaaagggaataagggcgacacggaaatgttgaatactcatactcttcctttttcaatattattgaagcatttatcagggttattgtctcatgagcggatacatatttgaatgtatttagaaaaataaacaaataggggttccgcgcacatttccccgaaaagtgccacctgacgtctaagaaaccattattatcatgacattaacctataaaaataggcgtatcacgaggccctttcgtc

SEQ ID NO: 390 - DNA, 4398 bp, synthetic construct
  source 1..4398: mol_type = other DNA
tcgcgcgtttcggtgatgacggtgaaaacctctgacacatgcagctcccggagacggtcacagcttgtctgtaagcggatgccgggagcagacaagcccgtcagggcgcgtcagcgggtgttggcgggtgtcggggctggcttaactatgcggcatcagagcagattgtactgagagtgcaccatatgcggtgtgaaataccgcacagatgcgtaaggagaaaataccgcatcaggcgccattcgccattcaggctgcgcaactgttgggaagggcgatcggtgcgggcctcttcgctattacgccagctggcgaaagggggatgtgctgcaaggcgattaagttgggtaacgccagggttttcccagtcacgacgttgtaaaacgacggccagtgaattcgagctcggtacccggggagggaagctcctatgtcttagcccctgaattaatcagagggattcctgcctgggaacgaaaagcagacattctctatcagggtcccttattcttttctgagtactggcccccctgagagtacagtagaagctatgaatcttccccctacaaaaaagcactcatgtaccttcaaacaaaattgttctcagtttccgtgatgctcttagataaaaaaatttacaagacctccggtttctggtttctggggccccacacaagtgtgctgggtggagagaaaatctcagtggtttttttttttttctctctaaccctgtttggtaagttccgtttttagccccggcctttttctagccaggctctcaactgtctcctgcgttgctgggaagttctggaaggaagcatgggggcaggtgccactggccgcgccatggacgggccgcgcctgctgctgttgctgcttctgggggtgtcccttggaggtgccaaggaggcatgccccacaggcctgtacacacacagcggtgagtgctgcaaagcctgcaacctgggcgagggtgtggcccagccttgtggagccaaccagaccgtgtgtgagccctgcctggacagcgtgacgttctccgacgtggtgagcgcgaccgagccgtgcaagccgtgcaccgagtgcgtggggctccagagcatgtcggcgccatgcgtggaggccgacgacgccgtgtgccgctgcgcctacggctactaccaggatgagacgactgggcgctgcgaggcgtgccgcgtgtgcgaggcgggctcgggcctcgtgttctcctgccaggacaagcagaacaccgtgtgcgaggagtgccccgacggcacgtattccgacgaggccaaccacgtggacccgtgcctgccctgcaccgtgtgcgaggacaccgagcgccagctccgcgagtgcacacgctgggccgacgccgagtgcgaggagatccctggccgttggattacacggtccacacccccagagggctcggacagcacagcccccagcacccaggagcctgaggcacctccagaacaagacctcatagccagcacggtggcaggtgtggtgaccacagtgatgggcagctcccagcccgtggtgacccgaggcaccaccgacaacctcatccctgtctattgctccatcctggctgctgtggttgtgggtcttgtggcctacatagccttcaagaggtggaacagccgcgccaagcgctcgggttcgggtgccaccaacttcagcctgctgaagcaggccggcgacgtggaggagaaccccggcccctgctccagaggttgggattcgtgtctggctctggaattgctactgctgcctctgtcactcctggtgaccagcattcaaggtactttccaccaactgtgtatctgtgattgtgcactgaaggcatggtcagttgggaaaggggagacgggatgtagttcaaccctagaagccagatctggtgtctggaaagcaggtatttccattccaatagcatggccatggcatggttggggagcctttcttagcactgatgaatggagcttcatctcctttcccacggggatgtgatcaaaacaggaacctggggagcaagagaagtaggctcctcatattttgtcccgtggttggtggtccatgaagttgtggaaaagtgtttgttttttcattttgaataagaagatcctctagagtcgacctgcaggcatgcaagcttggcgtaatcatggtcatagctgtttcctgtgtgaaattgttatccgctcacaattccacacaacatacgagccggaagcataaagtgtaaagcctggggtgcctaatgagtgagctaactcacattaattgcgttgcgctcactgcccgctttccagtcgggaaacctgtcgtgccagctgcattaatgaatcggccaacgcgcggggagaggcggtttgcgtattgggcgctcttccgcttcctcgctcactgactcgctgcgctcggtcgttcggctgcggcgagcggtatcagctcactcaaaggcggtaatacggttatccacagaatcaggggataacgcaggaaagaacatgtgagcaaaaggccagcaaaaggccaggaaccgtaaaaaggccgcgttgctggcgtttttccataggctccgcccccctgacgagcatcacaaaaatcgacgctcaagtcagaggtggcgaaacccgacaggactataaagataccaggcgtttccccctggaagctccctcgtgcgctctcctgttccgaccctgccgcttaccggatacctgtccgcctttctcccttcgggaagcgtggcgctttctcatagctcacgctgtaggtatctcagttcggtgtaggtcgttcgctccaagctgggctgtgtgcacgaaccccccgttcagcccgaccgctgcgccttatccggtaactatcgtcttgagtccaacccggtaagacacgacttatcgccactggcagcagccactggtaacaggattagcagagcgaggtatgtaggcggtgctacagagttcttgaagtggtggcctaactacggctacactagaaggacagtatttggtatctgcgctctgctgaagccagttaccttcggaaaaagagttggtagctcttgatccggcaaacaaaccaccgctggtagcggtggtttttttgtttgcaagcagcagattacgcgcagaaaaaaaggatctcaagaagatcctttgatcttttctacggggtctgacgctcagtggaacgaaaactcacgttaagggattttggtcatgagattatcaaaaaggatcttcacctagatccttttaaattaaaaatgaagttttaaatcaatctaaagtatatatgagtaaacttggtctgacagttaccaatgcttaatcagtgaggcacctatctcagcgatctgtctatttcgttcatccatagttgcctgactccccgtcgtgtagataactacgatacgggagggcttaccatctggccccagtgctgcaatgataccgcgagacccacgctcaccggctccagatttatcagcaataaaccagccagccggaagggccgagcgcagaagtggtcctgcaactttatccgcctccatccagtctattaattgttgccgggaagctagagtaagtagttcgccagttaatagtttgcgcaacgttgttgccattgctacaggcatcgtggtgtcacgctcgtcgtttggtatggcttcattcagctccggttcccaacgatcaaggcgagttacatgatcccccatgttgtgcaaaaaagcggttagctccttcggtcctccgatcgttgtcagaagtaagttggccgcagtgttatcactcatggttatggcagcactgcataattctcttactgtcatgccatccgtaagatgcttttctgtgactggtgagtactcaaccaagtcattctgagaatagtgtatgcggcgaccgagttgctcttgcccggcgtcaatacgggataataccgcgccacatagcagaactttaaaagtgctcatcattggaaaacgttcttcggggcgaaaactctcaaggatcttaccgctgttgagatccagttcgatgtaacccactcgtgcacccaactgatcttcagcatcttttactttcaccagcgtttctgggtgagcaaaaacaggaaggcaaaatgccgcaaaaaagggaataagggcgacacggaaatgttgaatactcatactcttcctttttcaatattattgaagcatttatcagggttattgtctcatgagcggatacatatttgaatgtatttagaaaaataaacaaataggggttccgcgcacatttccccgaaaagtgccacctgacgtctaagaaaccattattatcatgacattaacctataaaaataggcgtatcacgaggccctttcgtc

SEQ ID NO: 391 - DNA, 4051 bp, synthetic construct
  source 1..4051: mol_type = other DNA
tcgcgcgtttcggtgatgacggtgaaaacctctgacacatgcagctcccggagacggtcacagcttgtctgtaagcggatgccgggagcagacaagcccgtcagggcgcgtcagcgggtgttggcgggtgtcggggctggcttaactatgcggcatcagagcagattgtactgagagtgcaccatatgcggtgtgaaataccgcacagatgcgtaaggagaaaataccgcatcaggcgccattcgccattcaggctgcgcaactgttgggaagggcgatcggtgcgggcctcttcgctattacgccagctggcgaaagggggatgtgctgcaaggcgattaagttgggtaacgccagggttttcccagtcacgacgttgtaaaacgacggccagtgaattcgagctcggtacccggggaacgggcccacctcctccccatctcctctgtctccctgtctctgtctctctctccctcccccaccctctccccagtcctaccccctcctcacccctcctcccccagcactgcctctgtcactctcgcccacgtggatgtggaggaagagggggcgggagcaaggggcgggcaccctcccttcaacctgacctgggacagtttcccttccgctcacctccgcctgagcagtggagaaggcggcactctggtggggctgctccaggcatgggggcaggtgccactggccgcgccatggacgggccgcgcctgctgctgttgctgcttctgggggtgtcccttggaggtgccaaggaggcatgccccacaggcctgtacacacacagcggtgagtgctgcaaagcctgcaacctgggcgagggtgtggcccagccttgtggagccaaccagaccgtgtgtgagccctgcctggacagcgtgacgttctccgacgtggtgagcgcgaccgagccgtgcaagccgtgcaccgagtgcgtggggctccagagcatgtcggcgccatgcgtggaggccgacgacgccgtgtgccgctgcgcctacggctactaccaggatgagacgactgggcgctgcgaggcgtgccgcgtgtgcgaggcgggctcgggcctcgtgttctcctgccaggacaagcagaacaccgtgtgcgaggagtgccccgacggcacgtattccgacgaggccaaccacgtggacccgtgcctgccctgcaccgtgtgcgaggacaccgagcgccagctccgcgagtgcacacgctgggccgacgccgagtgcgaggagatccctggccgttggattacacggtccacacccccagagggctcggacagcacagcccccagcacccaggagcctgaggcacctccagaacaagacctcatagccagcacggtggcaggtgtggtgaccacagtgatgggcagctcccagcccgtggtgacccgaggcaccaccgacaacctcatccctgtctattgctccatcctggctgctgtggttgtgggtcttgtggcctacatagccttcaagaggtggaacagccgcgccaagcgctcgggttcgggtgccaccaacttcagcctgctgaagcaggccggcgacgtggaggagaaccccggccccatgcagattccacaagcgccctggccagtcgtctgggcggtgctacaactgggctggcggccaggatggttcttaggtaggtggggtcggcggtcaggtgtcccagagccaggggtctggagggaccttccaccctcagtccctggcaggtcggggggtgctgaggcgggcctggccctggcagcccagtcctctagagtcgacctgcaggcatgcaagcttggcgtaatcatggtcatagctgtttcctgtgtgaaattgttatccgctcacaattccacacaacatacgagccggaagcataaagtgtaaagcctggggtgcctaatgagtgagctaactcacattaattgcgttgcgctcactgcccgctttccagtcgggaaacctgtcgtgccagctgcattaatgaatcggccaacgcgcggggagaggcggtttgcgtattgggcgctcttccgcttcctcgctcactgactcgctgcgctcggtcgttcggctgcggcgagcggtatcagctcactcaaaggcggtaatacggttatccacagaatcaggggataacgcaggaaagaacatgtgagcaaaaggccagcaaaaggccaggaaccgtaaaaaggccgcgttgctggcgtttttccataggctccgcccccctgacgagcatcacaaaaatcgacgctcaagtcagaggtggcgaaacccgacaggactataaagataccaggcgtttccccctggaagctccctcgtgcgctctcctgttccgaccctgccgcttaccggatacctgtccgcctttctcccttcgggaagcgtggcgctttctcatagctcacgctgtaggtatctcagttcggtgtaggtcgttcgctccaagctgggctgtgtgcacgaaccccccgttcagcccgaccgctgcgccttatccggtaactatcgtcttgagtccaacccggtaagacacgacttatcgccactggcagcagccactggtaacaggattagcagagcgaggtatgtaggcggtgctacagagttcttgaagtggtggcctaactacggctacactagaaggacagtatttggtatctgcgctctgctgaagccagttaccttcggaaaaagagttggtagctcttgatccggcaaacaaaccaccgctggtagcggtggtttttttgtttgcaagcagcagattacgcgcagaaaaaaaggatctcaagaagatcctttgatcttttctacggggtctgacgctcagtggaacgaaaactcacgttaagggattttggtcatgagattatcaaaaaggatcttcacctagatccttttaaattaaaaatgaagttttaaatcaatctaaagtatatatgagtaaacttggtctgacagttaccaatgcttaatcagtgaggcacctatctcagcgatctgtctatttcgttcatccatagttgcctgactccccgtcgtgtagataactacgatacgggagggcttaccatctggccccagtgctgcaatgataccgcgagacccacgctcaccggctccagatttatcagcaataaaccagccagccggaagggccgagcgcagaagtggtcctgcaactttatccgcctccatccagtctattaattgttgccgggaagctagagtaagtagttcgccagttaatagtttgcgcaacgttgttgccattgctacaggcatcgtggtgtcacgctcgtcgtttggtatggcttcattcagctccggttcccaacgatcaaggcgagttacatgatcccccatgttgtgcaaaaaagcggttagctccttcggtcctccgatcgttgtcagaagtaagttggccgcagtgttatcactcatggttatggcagcactgcataattctcttactgtcatgccatccgtaagatgcttttctgtgactggtgagtactcaaccaagtcattctgagaatagtgtatgcggcgaccgagttgctcttgcccggcgtcaatacgggataataccgcgccacatagcagaactttaaaagtgctcatcattggaaaacgttcttcggggcgaaaactctcaaggatcttaccgctgttgagatccagttcgatgtaacccactcgtgcacccaactgatcttcagcatcttttactttcaccagcgtttctgggtgagcaaaaacaggaaggcaaaatgccgcaaaaaagggaataagggcgacacggaaatgttgaatactcatactcttcctttttcaatattattgaagcatttatcagggttattgtctcatgagcggatacatatttgaatgtatttagaaaaataaacaaataggggttccgcgcacatttccccgaaaagtgccacctgacgtctaagaaaccattattatcatgacattaacctataaaaataggcgtatcacgaggccctttcgtc

SEQ ID NO: 392 - DNA, 4398 bp, synthetic construct
  source 1..4398: mol_type = other DNA
tcgcgcgtttcggtgatgacggtgaaaacctctgacacatgcagctcccggagacggtcacagcttgtctgtaagcggatgccgggagcagacaagcccgtcagggcgcgtcagcgggtgttggcgggtgtcggggctggcttaactatgcggcatcagagcagattgtactgagagtgcaccatatgcggtgtgaaataccgcacagatgcgtaaggagaaaataccgcatcaggcgccattcgccattcaggctgcgcaactgttgggaagggcgatcggtgcgggcctcttcgctattacgccagctggcgaaagggggatgtgctgcaaggcgattaagttgggtaacgccagggttttcccagtcacgacgttgtaaaacgacggccagtgaattcgagctcggtacccggggaggaggtatagtaaatgtcaaatacgtttgccttcaagttgctccaagtctaaatgttgaggggacaagagatagggaaagagcttgttgataatagaaattcacatagacagctgtgggcaggatgtggggtgtttggcagagtgggagtgaaaactttttggagcaggtagaacaggagttcattttagagcaaggaaggctgtagtttaggggcacagaaagaaggctgctcccttcattagggttgaattatgaaaaaaaaccttagtgaaatttttgtatccttggatatattggaattcagtcataacattgactaattctaaggaaagaagaaaatatgtactagggctatgaacaatattttaaaactctaattctacaccttcttttatagcatgggggcaggtgccactggccgcgccatggacgggccgcgcctgctgctgttgctgcttctgggggtgtcccttggaggtgccaaggaggcatgccccacaggcctgtacacacacagcggtgagtgctgcaaagcctgcaacctgggcgagggtgtggcccagccttgtggagccaaccagaccgtgtgtgagccctgcctggacagcgtgacgttctccgacgtggtgagcgcgaccgagccgtgcaagccgtgcaccgagtgcgtggggctccagagcatgtcggcgccatgcgtggaggccgacgacgccgtgtgccgctgcgcctacggctactaccaggatgagacgactgggcgctgcgaggcgtgccgcgtgtgcgaggcgggctcgggcctcgtgttctcctgccaggacaagcagaacaccgtgtgcgaggagtgccccgacggcacgtattccgacgaggccaaccacgtggacccgtgcctgccctgcaccgtgtgcgaggacaccgagcgccagctccgcgagtgcacacgctgggccgacgccgagtgcgaggagatccctggccgttggattacacggtccacacccccagagggctcggacagcacagcccccagcacccaggagcctgaggcacctccagaacaagacctcatagccagcacggtggcaggtgtggtgaccacagtgatgggcagctcccagcccgtggtgacccgaggcaccaccgacaacctcatccctgtctattgctccatcctggctgctgtggttgtgggtcttgtggcctacatagccttcaagaggtggaacagccgcgccaagcgctcgggttcgggtgccaccaacttcagcctgctgaagcaggccggcgacgtggaggagaaccccggcccctctcagtggaatcaagtgcaacagttagaaatcaagtttttggagcaggtggatcaattctatgatgacaactttcccatggaaattcggcatctgttggcccaatggattgaaaatcaagactggtaggatcaaacatattttccctagaagttgatgcacaaatgtctgatgctctatccatgtgaatttattttatggtccactttttactcagtagatgcattcttttcaggtaaagaactttctcaaggatttgaaagccttcccaaagaaggggaataattgtcctttctggttccattcattgtaaatgaaaagttaatggttccagtgcttcttttctctgtaaacaaaaacccaaataatttttcatgtattaaaaaaagaagcaaatcaatcctctagagtcgacctgcaggcatgcaagcttggcgtaatcatggtcatagctgtttcctgtgtgaaattgttatccgctcacaattccacacaacatacgagccggaagcataaagtgtaaagcctggggtgcctaatgagtgagctaactcacattaattgcgttgcgctcactgcccgctttccagtcgggaaacctgtcgtgccagctgcattaatgaatcggccaacgcgcggggagaggcggtttgcgtattgggcgctcttccgcttcctcgctcactgactcgctgcgctcggtcgttcggctgcggcgagcggtatcagctcactcaaaggcggtaatacggttatccacagaatcaggggataacgcaggaaagaacatgtgagcaaaaggccagcaaaaggccaggaaccgtaaaaaggccgcgttgctggcgtttttccataggctccgcccccctgacgagcatcacaaaaatcgacgctcaagtcagaggtggcgaaacccgacaggactataaagataccaggcgtttccccctggaagctccctcgtgcgctctcctgttccgaccctgccgcttaccggatacctgtccgcctttctcccttcgggaagcgtggcgctttctcatagctcacgctgtaggtatctcagttcggtgtaggtcgttcgctccaagctgggctgtgtgcacgaaccccccgttcagcccgaccgctgcgccttatccggtaactatcgtcttgagtccaacccggtaagacacgacttatcgccactggcagcagccactggtaacaggattagcagagcgaggtatgtaggcggtgctacagagttcttgaagtggtggcctaactacggctacactagaaggacagtatttggtatctgcgctctgctgaagccagttaccttcggaaaaagagttggtagctcttgatccggcaaacaaaccaccgctggtagcggtggtttttttgtttgcaagcagcagattacgcgcagaaaaaaaggatctcaagaagatcctttgatcttttctacggggtctgacgctcagtggaacgaaaactcacgttaagggattttggtcatgagattatcaaaaaggatcttcacctagatccttttaaattaaaaatgaagttttaaatcaatctaaagtatatatgagtaaacttggtctgacagttaccaatgcttaatcagtgaggcacctatctcagcgatctgtctatttcgttcatccatagttgcctgactccccgtcgtgtagataactacgatacgggagggcttaccatctggccccagtgctgcaatgataccgcgagacccacgctcaccggctccagatttatcagcaataaaccagccagccggaagggccgagcgcagaagtggtcctgcaactttatccgcctccatccagtctattaattgttgccgggaagctagagtaagtagttcgccagttaatagtttgcgcaacgttgttgccattgctacaggcatcgtggtgtcacgctcgtcgtttggtatggcttcattcagctccggttcccaacgatcaaggcgagttacatgatcccccatgttgtgcaaaaaagcggttagctccttcggtcctccgatcgttgtcagaagtaagttggccgcagtgttatcactcatggttatggcagcactgcataattctcttactgtcatgccatccgtaagatgcttttctgtgactggtgagtactcaaccaagtcattctgagaatagtgtatgcggcgaccgagttgctcttgcccggcgtcaatacgggataataccgcgccacatagcagaactttaaaagtgctcatcattggaaaacgttcttcggggcgaaaactctcaaggatcttaccgctgttgagatccagttcgatgtaacccactcgtgcacccaactgatcttcagcatcttttactttcaccagcgtttctgggtgagcaaaaacaggaaggcaaaatgccgcaaaaaagggaataagggcgacacggaaatgttgaatactcatactcttcctttttcaatattattgaagcatttatcagggttattgtctcatgagcggatacatatttgaatgtatttagaaaaataaacaaataggggttccgcgcacatttccccgaaaagtgccacctgacgtctaagaaaccattattatcatgacattaacctataaaaataggcgtatcacgaggccctttcgtc

SEQ ID NO: 393 - DNA, 4398 bp, synthetic construct
  source 1..4398: mol_type = other DNA
tcgcgcgtttcggtgatgacggtgaaaacctctgacacatgcagctcccggagacggtcacagcttgtctgtaagcggatgccgggagcagacaagcccgtcagggcgcgtcagcgggtgttggcgggtgtcggggctggcttaactatgcggcatcagagcagattgtactgagagtgcaccatatgcggtgtgaaataccgcacagatgcgtaaggagaaaataccgcatcaggcgccattcgccattcaggctgcgcaactgttgggaagggcgatcggtgcgggcctcttcgctattacgccagctggcgaaagggggatgtgctgcaaggcgattaagttgggtaacgccagggttttcccagtcacgacgttgtaaaacgacggccagtgaattcgagctcggtacccggggaatttcctttgagtgtcatgtgggtgctcaaaaagttagattttggaccatttcagatttcagagttttggattagggatgctcgactggtaagtaatgcagatattccaaaatctggacaaatctgaaatccaaaatgcttggaatagcagatactcaactggtagcactccctggaagaatatgcaccaaactgatagcagtggttacttctggagaggaggggaaagaaccaagattagcagtaggatcaacatatattttaatgttttctgtatttttattacttgtataatttaaacattttaaattagtaataatgaacaatcatgaaactatggatgatttagtccagcaaaatatccaattgggaaccctcatccttctgacgcagagcccaaatgggggcaggtgccactggccgcgccatggacgggccgcgcctgctgctgttgctgcttctgggggtgtcccttggaggtgccaaggaggcatgccccacaggcctgtacacacacagcggtgagtgctgcaaagcctgcaacctgggcgagggtgtggcccagccttgtggagccaaccagaccgtgtgtgagccctgcctggacagcgtgacgttctccgacgtggtgagcgcgaccgagccgtgcaagccgtgcaccgagtgcgtggggctccagagcatgtcggcgccatgcgtggaggccgacgacgccgtgtgccgctgcgcctacggctactaccaggatgagacgactgggcgctgcgaggcgtgccgcgtgtgcgaggcgggctcgggcctcgtgttctcctgccaggacaagcagaacaccgtgtgcgaggagtgccccgacggcacgtattccgacgaggccaaccacgtggacccgtgcctgccctgcaccgtgtgcgaggacaccgagcgccagctccgcgagtgcacacgctgggccgacgccgagtgcgaggagatccctggccgttggattacacggtccacacccccagagggctcggacagcacagcccccagcacccaggagcctgaggcacctccagaacaagacctcatagccagcacggtggcaggtgtggtgaccacagtgatgggcagctcccagcccgtggtgacccgaggcaccaccgacaacctcatccctgtctattgctccatcctggctgctgtggttgtgggtcttgtggcctacatagccttcaagaggtggaacagccgcgccaagcgctcgggttcgggtgccaccaacttcagcctgctgaagcaggccggcgacgtggaggagaaccccggccccgcgcagtgggaaatgctgcagaatcttgacagcccctttcaggatcagctgcaccagctttactcgcacagcctcctgcctgtggacattcgacagtacttggctgtctggattgaagaccagaactggtgaggccttcaggaagttgggggaatgaaaaaggtggttccttacttctgggcccccgggatcctggaatcattaatggcaggaaggggttggaaagcctcaggactacagtaacactgcagagacactaatacttcttattcctggtgcccaggcaggaagctgcacttgggagtgatgattccaaggctaccatgctattcttccacttcttggatcagctgaactatgagtgtggccgttgcagccaggacccagagtccttgttgcttcctctagagtcgacctgcaggcatgcaagcttggcgtaatcatggtcatagctgtttcctgtgtgaaattgttatccgctcacaattccacacaacatacgagccggaagcataaagtgtaaagcctggggtgcctaatgagtgagctaactcacattaattgcgttgcgctcactgcccgctttccagtcgggaaacctgtcgtgccagctgcattaatgaatcggccaacgcgcggggagaggcggtttgcgtattgggcgctcttccgcttcctcgctcactgactcgctgcgctcggtcgttcggctgcggcgagcggtatcagctcactcaaaggcggtaatacggttatccacagaatcaggggataacgcaggaaagaacatgtgagcaaaaggccagcaaaaggccaggaaccgtaaaaaggccgcgttgctggcgtttttccataggctccgcccccctgacgagcatcacaaaaatcgacgctcaagtcagaggtggcgaaacccgacaggactataaagataccaggcgtttccccctggaagctccctcgtgcgctctcctgttccgaccctgccgcttaccggatacctgtccgcctttctcccttcgggaagcgtggcgctttctcatagctcacgctgtaggtatctcagttcggtgtaggtcgttcgctccaagctgggctgtgtgcacgaaccccccgttcagcccgaccgctgcgccttatccggtaactatcgtcttgagtccaacccggtaagacacgacttatcgccactggcagcagccactggtaacaggattagcagagcgaggtatgtaggcggtgctacagagttcttgaagtggtggcctaactacggctacactagaaggacagtatttggtatctgcgctctgctgaagccagttaccttcggaaaaagagttggtagctcttgatccggcaaacaaaccaccgctggtagcggtggtttttttgtttgcaagcagcagattacgcgcagaaaaaaaggatctcaagaagatcctttgatcttttctacggggtctgacgctcagtggaacgaaaactcacgttaagggattttggtcatgagattatcaaaaaggatcttcacctagatccttttaaattaaaaatgaagttttaaatcaatctaaagtatatatgagtaaacttggtctgacagttaccaatgcttaatcagtgaggcacctatctcagcgatctgtctatttcgttcatccatagttgcctgactccccgtcgtgtagataactacgatacgggagggcttaccatctggccccagtgctgcaatgataccgcgagacccacgctcaccggctccagatttatcagcaataaaccagccagccggaagggccgagcgcagaagtggtcctgcaactttatccgcctccatccagtctattaattgttgccgggaagctagagtaagtagttcgccagttaatagtttgcgcaacgttgttgccattgctacaggcatcgtggtgtcacgctcgtcgtttggtatggcttcattcagctccggttcccaacgatcaaggcgagttacatgatcccccatgttgtgcaaaaaagcggttagctccttcggtcctccgatcgttgtcagaagtaagttggccgcagtgttatcactcatggttatggcagcactgcataattctcttactgtcatgccatccgtaagatgcttttctgtgactggtgagtactcaaccaagtcattctgagaatagtgtatgcggcgaccgagttgctcttgcccggcgtcaatacgggataataccgcgccacatagcagaactttaaaagtgctcatcattggaaaacgttcttcggggcgaaaactctcaaggatcttaccgctgttgagatccagttcgatgtaacccactcgtgcacccaactgatcttcagcatcttttactttcaccagcgtttctgggtgagcaaaaacaggaaggcaaaatgccgcaaaaaagggaataagggcgacacggaaatgttgaatactcatactcttcctttttcaatattattgaagcatttatcagggttattgtctcatgagcggatacatatttgaatgtatttagaaaaataaacaaataggggttccgcgcacatttccccgaaaagtgccacctgacgtctaagaaaccattattatcatgacattaacctataaaaataggcgtatcacgaggccctttcgtc

SEQ ID NO: 394 - DNA, 4388 bp, synthetic construct
  source 1..4388: mol_type = other DNA
tcgcgcgtttcggtgatgacggtgaaaacctctgacacatgcagctcccggagacggtcacagcttgtctgtaagcggatgccgggagcagacaagcccgtcagggcgcgtcagcgggtgttggcgggtgtcggggctggcttaactatgcggcatcagagcagattgtactgagagtgcaccatatgcggtgtgaaataccgcacagatgcgtaaggagaaaataccgcatcaggcgccattcgccattcaggctgcgcaactgttgggaagggcgatcggtgcgggcctcttcgctattacgccagctggcgaaagggggatgtgctgcaaggcgattaagttgggtaacgccagggttttcccagtcacgacgttgtaaaacgacggccagtgaattcgagctcggtacccggggagctccatttcaggtgtatctcatctgagacattattagagggttctctttatgtgccatgactgagtagcgttttcttccactgaagtattgcttcctctttgttgatatcacaggacagacatcagaacacttacaggatgtgtgtagtgtggcatgacagagaactttggtttcctttaatgtgactgtagacctggcagtgttactataagaatcactggcaatcagacacccgggtgtgctgagctagcactcagtgggggcggctactgctcatgtgattgtggagtagacagttggaagaagtacccagtccatttggagagttaaaactgtgcctaacagaggtgtcctctgacttttcttctgcaagctccatgggggcaggtgccactggccgcgccatggacgggccgcgcctgctgctgttgctgcttctgggggtgtcccttggaggtgccaaggaggcatgccccacaggcctgtacacacacagcggtgagtgctgcaaagcctgcaacctgggcgagggtgtggcccagccttgtggagccaaccagaccgtgtgtgagccctgcctggacagcgtgacgttctccgacgtggtgagcgcgaccgagccgtgcaagccgtgcaccgagtgcgtggggctccagagcatgtcggcgccatgcgtggaggccgacgacgccgtgtgccgctgcgcctacggctactaccaggatgagacgactgggcgctgcgaggcgtgccgcgtgtgcgaggcgggctcgggcctcgtgttctcctgccaggacaagcagaacaccgtgtgcgaggagtgccccgacggcacgtattccgacgaggccaaccacgtggacccgtgcctgccctgcaccgtgtgcgaggacaccgagcgccagctccgcgagtgcacacgctgggccgacgccgagtgcgaggagatccctggccgttggattacacggtccacacccccagagggctcggacagcacagcccccagcacccaggagcctgaggcacctccagaacaagacctcatagccagcacggtggcaggtgtggtgaccacagtgatgggcagctcccagcccgtggtgacccgaggcaccaccgacaacctcatccctgtctattgctccatcctggctgctgtggttgtgggtcttgtggcctacatagccttcaagaggtggaacagccgcgccaagcgctcgggttcgggtgccaccaacttcagcctgctgaagcaggccggcgacgtggaggagaaccccggccccttttcacatcttccgtttgactgtgtcctgctgctgctgctgctactacttacaagtaagtctcggcatggatatttacaatgacataatggtgctgtacagaggacaagggagagatacaaggatggccattgtaatgttgtttgtaatagcaaaagcttggaagcaacctaaatgtccgtcgatgagggagtgggtaaataaatgtgatataatcatgatacaaacagtgagtctgacaaaacatactggtatagaatgtctcaaaattataatgttattaaagaaaaaaagttgcagaataatgcatatattaggcttctatttgtgtgtgtgcattgtcggggagcaggaatatgtggacatttcttaatgtataagctctaggaaaaggaaccagggaatggtaaatcctctagagtcgacctgcaggcatgcaagcttggcgtaatcatggtcatagctgtttcctgtgtgaaattgttatccgctcacaattccacacaacatacgagccggaagcataaagtgtaaagcctggggtgcctaatgagtgagctaactcacattaattgcgttgcgctcactgcccgctttccagtcgggaaacctgtcgtgccagctgcattaatgaatcggccaacgcgcggggagaggcggtttgcgtattgggcgctcttccgcttcctcgctcactgactcgctgcgctcggtcgttcggctgcggcgagcggtatcagctcactcaaaggcggtaatacggttatccacagaatcaggggataacgcaggaaagaacatgtgagcaaaaggccagcaaaaggccaggaaccgtaaaaaggccgcgttgctggcgtttttccataggctccgcccccctgacgagcatcacaaaaatcgacgctcaagtcagaggtggcgaaacccgacaggactataaagataccaggcgtttccccctggaagctccctcgtgcgctctcctgttccgaccctgccgcttaccggatacctgtccgcctttctcccttcgggaagcgtggcgctttctcatagctcacgctgtaggtatctcagttcggtgtaggtcgttcgctccaagctgggctgtgtgcacgaaccccccgttcagcccgaccgctgcgccttatccggtaactatcgtcttgagtccaacccggtaagacacgacttatcgccactggcagcagccactggtaacaggattagcagagcgaggtatgtaggcggtgctacagagttcttgaagtggtggcctaactacggctacactagaaggacagtatttggtatctgcgctctgctgaagccagttaccttcggaaaaagagttggtagctcttgatccggcaaacaaaccaccgctggtagcggtggtttttttgtttgcaagcagcagattacgcgcagaaaaaaaggatctcaagaagatcctttgatcttttctacggggtctgacgctcagtggaacgaaaactcacgttaagggattttggtcatgagattatcaaaaaggatcttcacctagatccttttaaattaaaaatgaagttttaaatcaatctaaagtatatatgagtaaacttggtctgacagttaccaatgcttaatcagtgaggcacctatctcagcgatctgtctatttcgttcatccatagttgcctgactccccgtcgtgtagataactacgatacgggagggcttaccatctggccccagtgctgcaatgataccgcgagacccacgctcaccggctccagatttatcagcaataaaccagccagccggaagggccgagcgcagaagtggtcctgcaactttatccgcctccatccagtctattaattgttgccgggaagctagagtaagtagttcgccagttaatagtttgcgcaacgttgttgccattgctacaggcatcgtggtgtcacgctcgtcgtttggtatggcttcattcagctccggttcccaacgatcaaggcgagttacatgatcccccatgttgtgcaaaaaagcggttagctccttcggtcctccgatcgttgtcagaagtaagttggccgcagtgttatcactcatggttatggcagcactgcataattctcttactgtcatgccatccgtaagatgcttttctgtgactggtgagtactcaaccaagtcattctgagaatagtgtatgcggcgaccgagttgctcttgcccggcgtcaatacgggataataccgcgccacatagcagaactttaaaagtgctcatcattggaaaacgttcttcggggcgaaaactctcaaggatcttaccgctgttgagatccagttcgatgtaacccactcgtgcacccaactgatcttcagcatcttttactttcaccagcgtttctgggtgagcaaaaacaggaaggcaaaatgccgcaaaaaagggaataagggcgacacggaaatgttgaatactcatactcttcctttttcaatattattgaagcatttatcagggttattgtctcatgagcggatacatatttgaatgtatttagaaaaataaacaaataggggttccgcgcacatttccccgaaaagtgccacctgacgtctaagaaaccattattatcatgacattaacctataaaaataggcgtatcacgaggccctttcgtc

SEQ ID NO: 395 - DNA, 4378 bp, synthetic construct
  source 1..4378: mol_type = other DNA
tcgcgcgtttcggtgatgacggtgaaaacctctgacacatgcagctcccggagacggtcacagcttgtctgtaagcggatgccgggagcagacaagcccgtcagggcgcgtcagcgggtgttggcgggtgtcggggctggcttaactatgcggcatcagagcagattgtactgagagtgcaccatatgcggtgtgaaataccgcacagatgcgtaaggagaaaataccgcatcaggcgccattcgccattcaggctgcgcaactgttgggaagggcgatcggtgcgggcctcttcgctattacgccagctggcgaaagggggatgtgctgcaaggcgattaagttgggtaacgccagggttttcccagtcacgacgttgtaaaacgacggccagtgaattcgagctcggtacccggggagcagcacccaccccaccccccacgccgcctgggagtggcctctttgtgtgtattttttttttcctcctaaggaaggttttttttcttccctctagtgggcggggcagaggagttagccaagatgtgactttgaaaccctcagcgtctcagtgcccttttgttctaaacaaagaattttgtaattggttctaccaaagaaggatataatgaagtcactatgggaaaagatggggaggagagttgtaggattctacattaattctcttgtgcccttagcccactacttcagaatttcctgaagaaagcaagcctgaattggttttttaaattgctttaaaaattttttttaactgggttaatgcttgctgaattggaagtgaatgggggcaggtgccactggccgcgccatggacgggccgcgcctgctgctgttgctgcttctgggggtgtcccttggaggtgccaaggaggcatgccccacaggcctgtacacacacagcggtgagtgctgcaaagcctgcaacctgggcgagggtgtggcccagccttgtggagccaaccagaccgtgtgtgagccctgcctggacagcgtgacgttctccgacgtggtgagcgcgaccgagccgtgcaagccgtgcaccgagtgcgtggggctccagagcatgtcggcgccatgcgtggaggccgacgacgccgtgtgccgctgcgcctacggctactaccaggatgagacgactgggcgctgcgaggcgtgccgcgtgtgcgaggcgggctcgggcctcgtgttctcctgccaggacaagcagaacaccgtgtgcgaggagtgccccgacggcacgtattccgacgaggccaaccacgtggacccgtgcctgccctgcaccgtgtgcgaggacaccgagcgccagctccgcgagtgcacacgctgggccgacgccgagtgcgaggagatccctggccgttggattacacggtccacacccccagagggctcggacagcacagcccccagcacccaggagcctgaggcacctccagaacaagacctcatagccagcacggtggcaggtgtggtgaccacagtgatgggcagctcccagcccgtggtgacccgaggcaccaccgacaacctcatccctgtctattgctccatcctggctgctgtggttgtgggtcttgtggcctacatagccttcaagaggtggaacagccgcgccaagcgctcgggttcgggtgccaccaacttcagcctgctgaagcaggccggcgacgtggaggagaaccccggcccctcgattcctttacctcttttgcagatatacacttcagataactacaccgaggaaatgggctcaggggactatgactccatgaaggaaccctgtttccgtgaagaaaatgctaatttcaataaaatcttcctgcccaccatctactccatcatcttcttaactggcattgtgggcaatggattggtcatcctggtcatgggttaccagaagaaactgagaagcatgacggacaagtacaggctgcacctgtcagtggccgacctcctctttgtcatcacgcttcccttctgggcagttgatgccgtggcaaactggtactttgggaacttcctatgcaaggcagtccatgtcatctacacagtcaacctctacagcagtgtcctcatcctggccttcatcatcctctagagtcgacctgcaggcatgcaagcttggcgtaatcatggtcatagctgtttcctgtgtgaaattgttatccgctcacaattccacacaacatacgagccggaagcataaagtgtaaagcctggggtgcctaatgagtgagctaactcacattaattgcgttgcgctcactgcccgctttccagtcgggaaacctgtcgtgccagctgcattaatgaatcggccaacgcgcggggagaggcggtttgcgtattgggcgctcttccgcttcctcgctcactgactcgctgcgctcggtcgttcggctgcggcgagcggtatcagctcactcaaaggcggtaatacggttatccacagaatcaggggataacgcaggaaagaacatgtgagcaaaaggccagcaaaaggccaggaaccgtaaaaaggccgcgttgctggcgtttttccataggctccgcccccctgacgagcatcacaaaaatcgacgctcaagtcagaggtggcgaaacccgacaggactataaagataccaggcgtttccccctggaagctccctcgtgcgctctcctgttccgaccctgccgcttaccggatacctgtccgcctttctcccttcgggaagcgtggcgctttctcatagctcacgctgtaggtatctcagttcggtgtaggtcgttcgctccaagctgggctgtgtgcacgaaccccccgttcagcccgaccgctgcgccttatccggtaactatcgtcttgagtccaacccggtaagacacgacttatcgccactggcagcagccactggtaacaggattagcagagcgaggtatgtaggcggtgctacagagttcttgaagtggtggcctaactacggctacactagaaggacagtatttggtatctgcgctctgctgaagccagttaccttcggaaaaagagttggtagctcttgatccggcaaacaaaccaccgctggtagcggtggtttttttgtttgcaagcagcagattacgcgcagaaaaaaaggatctcaagaagatcctttgatcttttctacggggtctgacgctcagtggaacgaaaactcacgttaagggattttggtcatgagattatcaaaaaggatcttcacctagatccttttaaattaaaaatgaagttttaaatcaatctaaagtatatatgagtaaacttggtctgacagttaccaatgcttaatcagtgaggcacctatctcagcgatctgtctatttcgttcatccatagttgcctgactccccgtcgtgtagataactacgatacgggagggcttaccatctggccccagtgctgcaatgataccgcgagacccacgctcaccggctccagatttatcagcaataaaccagccagccggaagggccgagcgcagaagtggtcctgcaactttatccgcctccatccagtctattaattgttgccgggaagctagagtaagtagttcgccagttaatagtttgcgcaacgttgttgccattgctacaggcatcgtggtgtcacgctcgtcgtttggtatggcttcattcagctccggttcccaacgatcaaggcgagttacatgatcccccatgttgtgcaaaaaagcggttagctccttcggtcctccgatcgttgtcagaagtaagttggccgcagtgttatcactcatggttatggcagcactgcataattctcttactgtcatgccatccgtaagatgcttttctgtgactggtgagtactcaaccaagtcattctgagaatagtgtatgcggcgaccgagttgctcttgcccggcgtcaatacgggataataccgcgccacatagcagaactttaaaagtgctcatcattggaaaacgttcttcggggcgaaaactctcaaggatcttaccgctgttgagatccagttcgatgtaacccactcgtgcacccaactgatcttcagcatcttttactttcaccagcgtttctgggtgagcaaaaacaggaaggcaaaatgccgcaaaaaagggaataagggcgacacggaaatgttgaatactcatactcttcctttttcaatattattgaagcatttatcagggttattgtctcatgagcggatacatatttgaatgtatttagaaaaataaacaaataggggttccgcgcacatttccccgaaaagtgccacctgacgtctaagaaaccattattatcatgacattaacctataaaaataggcgtatcacgaggccctttcgtc

SEQ ID NO: 396 - DNA, 4398 bp, synthetic construct
  source 1..4398: mol_type = other DNA
tcgcgcgtttcggtgatgacggtgaaaacctctgacacatgcagctcccggagacggtcacagcttgtctgtaagcggatgccgggagcagacaagcccgtcagggcgcgtcagcgggtgttggcgggtgtcggggctggcttaactatgcggcatcagagcagattgtactgagagtgcaccatatgcggtgtgaaataccgcacagatgcgtaaggagaaaataccgcatcaggcgccattcgccattcaggctgcgcaactgttgggaagggcgatcggtgcgggcctcttcgctattacgccagctggcgaaagggggatgtgctgcaaggcgattaagttgggtaacgccagggttttcccagtcacgacgttgtaaaacgacggccagtgaattcgagctcggtacccggggattcagtgtagttttatgacaaagaaaattttctgagttacttttgtatccccacccccttaaagaaaggaggaaaaactgtttcatacagaaggcgttaattgcatgaattagagctatcacctaagtgtgggctaatgtaacaaagagggatttcacctacatccattcagtcagtctttgggggtttaaagaaattccaaagagtcatcagaagaggaaaaatgaaggtaatgttttttcagacaggtaaagtctttgaaaatatgtgtaatatgtaaaacattttgacacccccataatatttttccagaattaacagtataaattgcatctcttgttcaagagttccctatcactctctttaatcactactcacagtaacctcaactcctgccacaatgggggcaggtgccactggccgcgccatggacgggccgcgcctgctgctgttgctgcttctgggggtgtcccttggaggtgccaaggaggcatgccccacaggcctgtacacacacagcggtgagtgctgcaaagcctgcaacctgggcgagggtgtggcccagccttgtggagccaaccagaccgtgtgtgagccctgcctggacagcgtgacgttctccgacgtggtgagcgcgaccgagccgtgcaagccgtgcaccgagtgcgtggggctccagagcatgtcggcgccatgcgtggaggccgacgacgccgtgtgccgctgcgcctacggctactaccaggatgagacgactgggcgctgcgaggcgtgccgcgtgtgcgaggcgggctcgggcctcgtgttctcctgccaggacaagcagaacaccgtgtgcgaggagtgccccgacggcacgtattccgacgaggccaaccacgtggacccgtgcctgccctgcaccgtgtgcgaggacaccgagcgccagctccgcgagtgcacacgctgggccgacgccgagtgcgaggagatccctggccgttggattacacggtccacacccccagagggctcggacagcacagcccccagcacccaggagcctgaggcacctccagaacaagacctcatagccagcacggtggcaggtgtggtgaccacagtgatgggcagctcccagcccgtggtgacccgaggcaccaccgacaacctcatccctgtctattgctccatcctggctgctgtggttgtgggtcttgtggcctacatagccttcaagaggtggaacagccgcgccaagcgctcgggttcgggtgccaccaacttcagcctgctgaagcaggccggcgacgtggaggagaaccccggcccctacaggatgcaactcctgtcttgcattgcactaagtcttgcacttgtcacaaacagtgcacctacttcaagttctacaaagaaaacacagctacaactggagcatttactgctggatttacagatgattttgaatggaattaatgtaagtatatttcctttcttactaaaattattacatttagtaatctagctggagatcatttcttaataacaatgcattatactttcttagaattacaagaatcccaaactcaccaggatgctcacatttaagttttacatgcccaagaaggtaagtacaatattttatgttcaatttctgttttaataaaattcaaagtaatatgaaaatttgcacagatgggactaatagcagctcatctgaggtaaagagtaactcctctagagtcgacctgcaggcatgcaagcttggcgtaatcatggtcatagctgtttcctgtgtgaaattgttatccgctcacaattccacacaacatacgagccggaagcataaagtgtaaagcctggggtgcctaatgagtgagctaactcacattaattgcgttgcgctcactgcccgctttccagtcgggaaacctgtcgtgccagctgcattaatgaatcggccaacgcgcggggagaggcggtttgcgtattgggcgctcttccgcttcctcgctcactgactcgctgcgctcggtcgttcggctgcggcgagcggtatcagctcactcaaaggcggtaatacggttatccacagaatcaggggataacgcaggaaagaacatgtgagcaaaaggccagcaaaaggccaggaaccgtaaaaaggccgcgttgctggcgtttttccataggctccgcccccctgacgagcatcacaaaaatcgacgctcaagtcagaggtggcgaaacccgacaggactataaagataccaggcgtttccccctggaagctccctcgtgcgctctcctgttccgaccctgccgcttaccggatacctgtccgcctttctcccttcgggaagcgtggcgctttctcatagctcacgctgtaggtatctcagttcggtgtaggtcgttcgctccaagctgggctgtgtgcacgaaccccccgttcagcccgaccgctgcgccttatccggtaactatcgtcttgagtccaacccggtaagacacgacttatcgccactggcagcagccactggtaacaggattagcagagcgaggtatgtaggcggtgctacagagttcttgaagtggtggcctaactacggctacactagaaggacagtatttggtatctgcgctctgctgaagccagttaccttcggaaaaagagttggtagctcttgatccggcaaacaaaccaccgctggtagcggtggtttttttgtttgcaagcagcagattacgcgcagaaaaaaaggatctcaagaagatcctttgatcttttctacggggtctgacgctcagtggaacgaaaactcacgttaagggattttggtcatgagattatcaaaaaggatcttcacctagatccttttaaattaaaaatgaagttttaaatcaatctaaagtatatatgagtaaacttggtctgacagttaccaatgcttaatcagtgaggcacctatctcagcgatctgtctatttcgttcatccatagttgcctgactccccgtcgtgtagataactacgatacgggagggcttaccatctggccccagtgctgcaatgataccgcgagacccacgctcaccggctccagatttatcagcaataaaccagccagccggaagggccgagcgcagaagtggtcctgcaactttatccgcctccatccagtctattaattgttgccgggaagctagagtaagtagttcgccagttaatagtttgcgcaacgttgttgccattgctacaggcatcgtggtgtcacgctcgtcgtttggtatggcttcattcagctccggttcccaacgatcaaggcgagttacatgatcccccatgttgtgcaaaaaagcggttagctccttcggtcctccgatcgttgtcagaagtaagttggccgcagtgttatcactcatggttatggcagcactgcataattctcttactgtcatgccatccgtaagatgcttttctgtgactggtgagtactcaaccaagtcattctgagaatagtgtatgcggcgaccgagttgctcttgcccggcgtcaatacgggataataccgcgccacatagcagaactttaaaagtgctcatcattggaaaacgttcttcggggcgaaaactctcaaggatcttaccgctgttgagatccagttcgatgtaacccactcgtgcacccaactgatcttcagcatcttttactttcaccagcgtttctgggtgagcaaaaacaggaaggcaaaatgccgcaaaaaagggaataagggcgacacggaaatgttgaatactcatactcttcctttttcaatattattgaagcatttatcagggttattgtctcatgagcggatacatatttgaatgtatttagaaaaataaacaaataggggttccgcgcacatttccccgaaaagtgccacctgacgtctaagaaaccattattatcatgacattaacctataaaaataggcgtatcacgaggccctttcgtc

SEQ ID NO: 397 - DNA, 4398 bp, synthetic construct
  source 1..4398: mol_type = other DNA
tcgcgcgtttcggtgatgacggtgaaaacctctgacacatgcagctcccggagacggtcacagcttgtctgtaagcggatgccgggagcagacaagcccgtcagggcgcgtcagcgggtgttggcgggtgtcggggctggcttaactatgcggcatcagagcagattgtactgagagtgcaccatatgcggtgtgaaataccgcacagatgcgtaaggagaaaataccgcatcaggcgccattcgccattcaggctgcgcaactgttgggaagggcgatcggtgcgggcctcttcgctattacgccagctggcgaaagggggatgtgctgcaaggcgattaagttgggtaacgccagggttttcccagtcacgacgttgtaaaacgacggccagtgaattcgagctcggtacccggggaaggtctctcccaggcttgggaaagtgtgtgtcatctctaggaggtggtcctcccaacacagggtactggcagagggagagggagggggcagaggcaggaagtgggtaactagactaacaaaggtgcctgtggcggtttgcccatcccaggtgggagggtggggctagggctcaggggccgtgtgtgaatttacttgtagcctgagggctcagagggagcaccggtttggagctgggaccccctattttagcttttctgtggctggtgaatggggatcccaggatctcacaatctcaggtacttttggaactttccagggcaaggccccattatatctgatgttgggggagcagatcttgggggagccccttcagccccctcttccattccctcagggaccatgggggcaggtgccactggccgcgccatggacgggccgcgcctgctgctgttgctgcttctgggggtgtcccttggaggtgccaaggaggcatgccccacaggcctgtacacacacagcggtgagtgctgcaaagcctgcaacctgggcgagggtgtggcccagccttgtggagccaaccagaccgtgtgtgagccctgcctggacagcgtgacgttctccgacgtggtgagcgcgaccgagccgtgcaagccgtgcaccgagtgcgtggggctccagagcatgtcggcgccatgcgtggaggccgacgacgccgtgtgccgctgcgcctacggctactaccaggatgagacgactgggcgctgcgaggcgtgccgcgtgtgcgaggcgggctcgggcctcgtgttctcctgccaggacaagcagaacaccgtgtgcgaggagtgccccgacggcacgtattccgacgaggccaaccacgtggacccgtgcctgccctgcaccgtgtgcgaggacaccgagcgccagctccgcgagtgcacacgctgggccgacgccgagtgcgaggagatccctggccgttggattacacggtccacacccccagagggctcggacagcacagcccccagcacccaggagcctgaggcacctccagaacaagacctcatagccagcacggtggcaggtgtggtgaccacagtgatgggcagctcccagcccgtggtgacccgaggcaccaccgacaacctcatccctgtctattgctccatcctggctgctgtggttgtgggtcttgtggcctacatagccttcaagaggtggaacagccgcgccaagcgctcgggttcgggtgccaccaacttcagcctgctgaagcaggccggcgacgtggaggagaaccccggccccggctgtggctgcagctcacacccggaagatgactggatggaaaacatcgatgtgtgtgagaactgccattatcccatagtcccactggatggcaagggcacggtaagaggcgagacaggggccttggtgagggagttgggtagagaatgcaacccaggagaaagaaatgaccagcactacaggcccttgaaagaatagagtggccctctcccctgaaatacagaaaggaaaagaggcccagagaggggaagggaatctcctaagatcacacagaaagtagttggtaaactcagggataacatctaaccaggctggagaggctgagagcagagcaggggggaagggggccagggtctgacccaatcttctgctttctgaccccaccctcatcccccactcctcctctagagtcgacctgcaggcatgcaagcttggcgtaatcatggtcatagctgtttcctgtgtgaaattgttatccgctcacaattccacacaacatacgagccggaagcataaagtgtaaagcctggggtgcctaatgagtgagctaactcacattaattgcgttgcgctcactgcccgctttccagtcgggaaacctgtcgtgccagctgcattaatgaatcggccaacgcgcggggagaggcggtttgcgtattgggcgctcttccgcttcctcgctcactgactcgctgcgctcggtcgttcggctgcggcgagcggtatcagctcactcaaaggcggtaatacggttatccacagaatcaggggataacgcaggaaagaacatgtgagcaaaaggccagcaaaaggccaggaaccgtaaaaaggccgcgttgctggcgtttttccataggctccgcccccctgacgagcatcacaaaaatcgacgctcaagtcagaggtggcgaaacccgacaggactataaagataccaggcgtttccccctggaagctccctcgtgcgctctcctgttccgaccctgccgcttaccggatacctgtccgcctttctcccttcgggaagcgtggcgctttctcatagctcacgctgtaggtatctcagttcggtgtaggtcgttcgctccaagctgggctgtgtgcacgaaccccccgttcagcccgaccgctgcgccttatccggtaactatcgtcttgagtccaacccggtaagacacgacttatcgccactggcagcagccactggtaacaggattagcagagcgaggtatgtaggcggtgctacagagttcttgaagtggtggcctaactacggctacactagaaggacagtatttggtatctgcgctctgctgaagccagttaccttcggaaaaagagttggtagctcttgatccggcaaacaaaccaccgctggtagcggtggtttttttgtttgcaagcagcagattacgcgcagaaaaaaaggatctcaagaagatcctttgatcttttctacggggtctgacgctcagtggaacgaaaactcacgttaagggattttggtcatgagattatcaaaaaggatcttcacctagatccttttaaattaaaaatgaagttttaaatcaatctaaagtatatatgagtaaacttggtctgacagttaccaatgcttaatcagtgaggcacctatctcagcgatctgtctatttcgttcatccatagttgcctgactccccgtcgtgtagataactacgatacgggagggcttaccatctggccccagtgctgcaatgataccgcgagacccacgctcaccggctccagatttatcagcaataaaccagccagccggaagggccgagcgcagaagtggtcctgcaactttatccgcctccatccagtctattaattgttgccgggaagctagagtaagtagttcgccagttaatagtttgcgcaacgttgttgccattgctacaggcatcgtggtgtcacgctcgtcgtttggtatggcttcattcagctccggttcccaacgatcaaggcgagttacatgatcccccatgttgtgcaaaaaagcggttagctccttcggtcctccgatcgttgtcagaagtaagttggccgcagtgttatcactcatggttatggcagcactgcataattctcttactgtcatgccatccgtaagatgcttttctgtgactggtgagtactcaaccaagtcattctgagaatagtgtatgcggcgaccgagttgctcttgcccggcgtcaatacgggataataccgcgccacatagcagaactttaaaagtgctcatcattggaaaacgttcttcggggcgaaaactctcaaggatcttaccgctgttgagatccagttcgatgtaacccactcgtgcacccaactgatcttcagcatcttttactttcaccagcgtttctgggtgagcaaaaacaggaaggcaaaatgccgcaaaaaagggaataagggcgacacggaaatgttgaatactcatactcttcctttttcaatattattgaagcatttatcagggttattgtctcatgagcggatacatatttgaatgtatttagaaaaataaacaaataggggttccgcgcacatttccccgaaaagtgccacctgacgtctaagaaaccattattatcatgacattaacctataaaaataggcgtatcacgaggccctttcgtc

SEQ ID NO: 398 - DNA, 4398 bp, synthetic construct
  source 1..4398: mol_type = other DNA
tcgcgcgtttcggtgatgacggtgaaaacctctgacacatgcagctcccggagacggtcacagcttgtctgtaagcggatgccgggagcagacaagcccgtcagggcgcgtcagcgggtgttggcgggtgtcggggctggcttaactatgcggcatcagagcagattgtactgagagtgcaccatatgcggtgtgaaataccgcacagatgcgtaaggagaaaataccgcatcaggcgccattcgccattcaggctgcgcaactgttgggaagggcgatcggtgcgggcctcttcgctattacgccagctggcgaaagggggatgtgctgcaaggcgattaagttgggtaacgccagggttttcccagtcacgacgttgtaaaacgacggccagtgaattcgagctcggtacccggggacaaggctgccatcttccctcctccccatctccaggggtgtcaggacctgtgtcagtggcctcccaggctgtccactccccagggtggaacagaagcccctctccccctgcagcccctggtgtggtccactctgccagtgtcatcgagggtgacacgcccctcaggacttcctggccttttcttccaaagcagaacatctctttgatcccagaacgattccctttctctccatcctccgcctcctgctccaaggctgattatctcttccttttcagatcccaagcactgcaagtccagatgcaacgggagcctggctcaagggacgacaagatccagccggaaagtgtagaagtcacaccccaatggcgggatagcagcccctgtgtgtgagcacccctccatgggggcaggtgccactggccgcgccatggacgggccgcgcctgctgctgttgctgcttctgggggtgtcccttggaggtgccaaggaggcatgccccacaggcctgtacacacacagcggtgagtgctgcaaagcctgcaacctgggcgagggtgtggcccagccttgtggagccaaccagaccgtgtgtgagccctgcctggacagcgtgacgttctccgacgtggtgagcgcgaccgagccgtgcaagccgtgcaccgagtgcgtggggctccagagcatgtcggcgccatgcgtggaggccgacgacgccgtgtgccgctgcgcctacggctactaccaggatgagacgactgggcgctgcgaggcgtgccgcgtgtgcgaggcgggctcgggcctcgtgttctcctgccaggacaagcagaacaccgtgtgcgaggagtgccccgacggcacgtattccgacgaggccaaccacgtggacccgtgcctgccctgcaccgtgtgcgaggacaccgagcgccagctccgcgagtgcacacgctgggccgacgccgagtgcgaggagatccctggccgttggattacacggtccacacccccagagggctcggacagcacagcccccagcacccaggagcctgaggcacctccagaacaagacctcatagccagcacggtggcaggtgtggtgaccacagtgatgggcagctcccagcccgtggtgacccgaggcaccaccgacaacctcatccctgtctattgctccatcctggctgctgtggttgtgggtcttgtggcctacatagccttcaagaggtggaacagccgcgccaagcgctcgggttcgggtgccaccaacttcagcctgctgaagcaggccggcgacgtggaggagaaccccggccccccaggtactcggcatctgttatcccctctatacctctctatatattatggagagacagggtcttgttctatcactgcggctggagtgcagtgatgtgatcataacatactgcagccctccacctccttggctcaagtgatcctcccattttagcctcccaagtagctgggaccacaggcacacacaaccaaatctggtgaattttttaaattttttgtagagacagggccttgctccgttgcccagactggtctcaaactcctggcctcaagcgatctccctgtctctgcctcccaaagcactgattacaggcaggagacactgtgcctggccgttcctttatattggaaaaaacgcaagtgatggtgacctgagacttggcggaggggcgggagtagtgtcctctagagtcgacctgcaggcatgcaagcttggcgtaatcatggtcatagctgtttcctgtgtgaaattgttatccgctcacaattccacacaacatacgagccggaagcataaagtgtaaagcctggggtgcctaatgagtgagctaactcacattaattgcgttgcgctcactgcccgctttccagtcgggaaacctgtcgtgccagctgcattaatgaatcggccaacgcgcggggagaggcggtttgcgtattgggcgctcttccgcttcctcgctcactgactcgctgcgctcggtcgttcggctgcggcgagcggtatcagctcactcaaaggcggtaatacggttatccacagaatcaggggataacgcaggaaagaacatgtgagcaaaaggccagcaaaaggccaggaaccgtaaaaaggccgcgttgctggcgtttttccataggctccgcccccctgacgagcatcacaaaaatcgacgctcaagtcagaggtggcgaaacccgacaggactataaagataccaggcgtttccccctggaagctccctcgtgcgctctcctgttccgaccctgccgcttaccggatacctgtccgcctttctcccttcgggaagcgtggcgctttctcatagctcacgctgtaggtatctcagttcggtgtaggtcgttcgctccaagctgggctgtgtgcacgaaccccccgttcagcccgaccgctgcgccttatccggtaactatcgtcttgagtccaacccggtaagacacgacttatcgccactggcagcagccactggtaacaggattagcagagcgaggtatgtaggcggtgctacagagttcttgaagtggtggcctaactacggctacactagaaggacagtatttggtatctgcgctctgctgaagccagttaccttcggaaaaagagttggtagctcttgatccggcaaacaaaccaccgctggtagcggtggtttttttgtttgcaagcagcagattacgcgcagaaaaaaaggatctcaagaagatcctttgatcttttctacggggtctgacgctcagtggaacgaaaactcacgttaagggattttggtcatgagattatcaaaaaggatcttcacctagatccttttaaattaaaaatgaagttttaaatcaatctaaagtatatatgagtaaacttggtctgacagttaccaatgcttaatcagtgaggcacctatctcagcgatctgtctatttcgttcatccatagttgcctgactccccgtcgtgtagataactacgatacgggagggcttaccatctggccccagtgctgcaatgataccgcgagacccacgctcaccggctccagatttatcagcaataaaccagccagccggaagggccgagcgcagaagtggtcctgcaactttatccgcctccatccagtctattaattgttgccgggaagctagagtaagtagttcgccagttaatagtttgcgcaacgttgttgccattgctacaggcatcgtggtgtcacgctcgtcgtttggtatggcttcattcagctccggttcccaacgatcaaggcgagttacatgatcccccatgttgtgcaaaaaagcggttagctccttcggtcctccgatcgttgtcagaagtaagttggccgcagtgttatcactcatggttatggcagcactgcataattctcttactgtcatgccatccgtaagatgcttttctgtgactggtgagtactcaaccaagtcattctgagaatagtgtatgcggcgaccgagttgctcttgcccggcgtcaatacgggataataccgcgccacatagcagaactttaaaagtgctcatcattggaaaacgttcttcggggcgaaaactctcaaggatcttaccgctgttgagatccagttcgatgtaacccactcgtgcacccaactgatcttcagcatcttttactttcaccagcgtttctgggtgagcaaaaacaggaaggcaaaatgccgcaaaaaagggaataagggcgacacggaaatgttgaatactcatactcttcctttttcaatattattgaagcatttatcagggttattgtctcatgagcggatacatatttgaatgtatttagaaaaataaacaaataggggttccgcgcacatttccccgaaaagtgccacctgacgtctaagaaaccattattatcatgacattaacctataaaaataggcgtatcacgaggccctttcgtc

SEQ ID NO: 399 - DNA, 4398 bp, synthetic construct
  source 1..4398: mol_type = other DNA
tcgcgcgtttcggtgatgacggtgaaaacctctgacacatgcagctcccggagacggtcacagcttgtctgtaagcggatgccgggagcagacaagcccgtcagggcgcgtcagcgggtgttggcgggtgtcggggctggcttaactatgcggcatcagagcagattgtactgagagtgcaccatatgcggtgtgaaataccgcacagatgcgtaaggagaaaataccgcatcaggcgccattcgccattcaggctgcgcaactgttgggaagggcgatcggtgcgggcctcttcgctattacgccagctggcgaaagggggatgtgctgcaaggcgattaagttgggtaacgccagggttttcccagtcacgacgttgtaaaacgacggccagtgaattcgagctcggtacccggggaaggtgctttagaaaggaggccacccaggcccatgactactccttgccacagggagccctgcacacagatgtgctaagctctcgctgccagccagagggaggagggtctgagccagtcagaaggagatgggccccagagagtaagaaagggggaggaggacccaagctgatccaaaaggtgggtctaagcagtcaagtggaggagggttccaatctgatggcggagggcccaagctcagcctaacgaggaggccaggcccaccaaggggcccctggaggacttgtttcccttgtcccttgtggttttttgcatttcctgttcccttgctgctcattgcggaagttcctcttcttaccctgcacccagagcctcgccagagaagacaagggcagaaagcaccatgggggcaggtgccactggccgcgccatggacgggccgcgcctgctgctgttgctgcttctgggggtgtcccttggaggtgccaaggaggcatgccccacaggcctgtacacacacagcggtgagtgctgcaaagcctgcaacctgggcgagggtgtggcccagccttgtggagccaaccagaccgtgtgtgagccctgcctggacagcgtgacgttctccgacgtggtgagcgcgaccgagccgtgcaagccgtgcaccgagtgcgtggggctccagagcatgtcggcgccatgcgtggaggccgacgacgccgtgtgccgctgcgcctacggctactaccaggatgagacgactgggcgctgcgaggcgtgccgcgtgtgcgaggcgggctcgggcctcgtgttctcctgccaggacaagcagaacaccgtgtgcgaggagtgccccgacggcacgtattccgacgaggccaaccacgtggacccgtgcctgccctgcaccgtgtgcgaggacaccgagcgccagctccgcgagtgcacacgctgggccgacgccgagtgcgaggagatccctggccgttggattacacggtccacacccccagagggctcggacagcacagcccccagcacccaggagcctgaggcacctccagaacaagacctcatagccagcacggtggcaggtgtggtgaccacagtgatgggcagctcccagcccgtggtgacccgaggcaccaccgacaacctcatccctgtctattgctccatcctggctgctgtggttgtgggtcttgtggcctacatagccttcaagaggtggaacagccgcgccaagcgctcgggttcgggtgccaccaacttcagcctgctgaagcaggccggcgacgtggaggagaaccccggccccagtgggggcccaatgggaggaaggcccgggggccgaggagcaccagcggttcagcagaacataccctccaccctcctccaggaccacgagaaccagcgactctttgagatgcttggacgaaaatgcttggtgagctggggatctcctgcccccgccccgtccccaccgtttcttcctcttcctctcctccttctctctcttcccctcctcccgctcctcctttccctctccatcatctcctctcctagaatttcccgtcataatccacccttcccaggaagatctcaatgtctacttgccttccctctggctgcagctcttcctttgggcccatgactgtcatgaggcaggaaggaccaggtctggctccaagaccttgtggctacccctgaccagactctcctctagagtcgacctgcaggcatgcaagcttggcgtaatcatggtcatagctgtttcctgtgtgaaattgttatccgctcacaattccacacaacatacgagccggaagcataaagtgtaaagcctggggtgcctaatgagtgagctaactcacattaattgcgttgcgctcactgcccgctttccagtcgggaaacctgtcgtgccagctgcattaatgaatcggccaacgcgcggggagaggcggtttgcgtattgggcgctcttccgcttcctcgctcactgactcgctgcgctcggtcgttcggctgcggcgagcggtatcagctcactcaaaggcggtaatacggttatccacagaatcaggggataacgcaggaaagaacatgtgagcaaaaggccagcaaaaggccaggaaccgtaaaaaggccgcgttgctggcgtttttccataggctccgcccccctgacgagcatcacaaaaatcgacgctcaagtcagaggtggcgaaacccgacaggactataaagataccaggcgtttccccctggaagctccctcgtgcgctctcctgttccgaccctgccgcttaccggatacctgtccgcctttctcccttcgggaagcgtggcgctttctcatagctcacgctgtaggtatctcagttcggtgtaggtcgttcgctccaagctgggctgtgtgcacgaaccccccgttcagcccgaccgctgcgccttatccggtaactatcgtcttgagtccaacccggtaagacacgacttatcgccactggcagcagccactggtaacaggattagcagagcgaggtatgtaggcggtgctacagagttcttgaagtggtggcctaactacggctacactagaaggacagtatttggtatctgcgctctgctgaagccagttaccttcggaaaaagagttggtagctcttgatccggcaaacaaaccaccgctggtagcggtggtttttttgtttgcaagcagcagattacgcgcagaaaaaaaggatctcaagaagatcctttgatcttttctacggggtctgacgctcagtggaacgaaaactcacgttaagggattttggtcatgagattatcaaaaaggatcttcacctagatccttttaaattaaaaatgaagttttaaatcaatctaaagtatatatgagtaaacttggtctgacagttaccaatgcttaatcagtgaggcacctatctcagcgatctgtctatttcgttcatccatagttgcctgactccccgtcgtgtagataactacgatacgggagggcttaccatctggccccagtgctgcaatgataccgcgagacccacgctcaccggctccagatttatcagcaataaaccagccagccggaagggccgagcgcagaagtggtcctgcaactttatccgcctccatccagtctattaattgttgccgggaagctagagtaagtagttcgccagttaatagtttgcgcaacgttgttgccattgctacaggcatcgtggtgtcacgctcgtcgtttggtatggcttcattcagctccggttcccaacgatcaaggcgagttacatgatcccccatgttgtgcaaaaaagcggttagctccttcggtcctccgatcgttgtcagaagtaagttggccgcagtgttatcactcatggttatggcagcactgcataattctcttactgtcatgccatccgtaagatgcttttctgtgactggtgagtactcaaccaagtcattctgagaatagtgtatgcggcgaccgagttgctcttgcccggcgtcaatacgggataataccgcgccacatagcagaactttaaaagtgctcatcattggaaaacgttcttcggggcgaaaactctcaaggatcttaccgctgttgagatccagttcgatgtaacccactcgtgcacccaactgatcttcagcatcttttactttcaccagcgtttctgggtgagcaaaaacaggaaggcaaaatgccgcaaaaaagggaataagggcgacacggaaatgttgaatactcatactcttcctttttcaatattattgaagcatttatcagggttattgtctcatgagcggatacatatttgaatgtatttagaaaaataaacaaataggggttccgcgcacatttccccgaaaagtgccacctgacgtctaagaaaccattattatcatgacattaacctataaaaataggcgtatcacgaggccctttcgtc

SEQ ID NO: 400 - DNA, 4398 bp, synthetic construct
  source 1..4398: mol_type = other DNA
tcgcgcgtttcggtgatgacggtgaaaacctctgacacatgcagctcccggagacggtcacagcttgtctgtaagcggatgccgggagcagacaagcccgtcagggcgcgtcagcgggtgttggcgggtgtcggggctggcttaactatgcggcatcagagcagattgtactgagagtgcaccatatgcggtgtgaaataccgcacagatgcgtaaggagaaaataccgcatcaggcgccattcgccattcaggctgcgcaactgttgggaagggcgatcggtgcgggcctcttcgctattacgccagctggcgaaagggggatgtgctgcaaggcgattaagttgggtaacgccagggttttcccagtcacgacgttgtaaaacgacggccagtgaattcgagctcggtacccggggaggtctgggcccctgggagccgcaggagataatggagatagagattctatgggctgagaccattggtaggttttatggtgttgaggaatacttaacactgattttttttttgagcgctgttaattaaatgttaaaatataatcggtttgctttagagaaaggcacgaatggattctggggctctggtatggaagttattttcgcagtgtaggtgcaaggtgagggaaccagatagggaggggagatgggcgagggtctgtggagaggggctggagtgaaatggtttgagagccatcatgtttataaaagcaatagaaggtacggtggggtaatactttctatttaatgcatttttcattttatttctttataactaatataaggcacattttacatttcagatgggggcaggtgccactggccgcgccatggacgggccgcgcctgctgctgttgctgcttctgggggtgtcccttggaggtgccaaggaggcatgccccacaggcctgtacacacacagcggtgagtgctgcaaagcctgcaacctgggcgagggtgtggcccagccttgtggagccaaccagaccgtgtgtgagccctgcctggacagcgtgacgttctccgacgtggtgagcgcgaccgagccgtgcaagccgtgcaccgagtgcgtggggctccagagcatgtcggcgccatgcgtggaggccgacgacgccgtgtgccgctgcgcctacggctactaccaggatgagacgactgggcgctgcgaggcgtgccgcgtgtgcgaggcgggctcgggcctcgtgttctcctgccaggacaagcagaacaccgtgtgcgaggagtgccccgacggcacgtattccgacgaggccaaccacgtggacccgtgcctgccctgcaccgtgtgcgaggacaccgagcgccagctccgcgagtgcacacgctgggccgacgccgagtgcgaggagatccctggccgttggattacacggtccacacccccagagggctcggacagcacagcccccagcacccaggagcctgaggcacctccagaacaagacctcatagccagcacggtggcaggtgtggtgaccacagtgatgggcagctcccagcccgtggtgacccgaggcaccaccgacaacctcatccctgtctattgctccatcctggctgctgtggttgtgggtcttgtggcctacatagccttcaagaggtggaacagccgcgccaagcgctcgggttcgggtgccaccaacttcagcctgctgaagcaggccggcgacgtggaggagaaccccggccccaatttacaacctatattttggataggactcatcagttcagtttgctgtgtgtttgctcaaacaggtaaaaacaaaaaattttcttagttgtcttttcatttccgtatcttgtattgcgctttgaccagttaggttcatatgagaacctaagtcataatcatgctgctccttctggaagccctgcaattgttcctcttactcagagaaaggtcaagttccttcatggtcaggctcccctcacccctgccacctgggatgatgggaggcaagttggctggtgaagtactaaaatgctagggattgaacacactgcaagaagatcttttgagaacatgagagtgtgtaagtgaacagaaggcaaaagcaagtatatttagaagcaaatgaaataaatgtgtagtcctctagagtcgacctgcaggcatgcaagcttggcgtaatcatggtcatagctgtttcctgtgtgaaattgttatccgctcacaattccacacaacatacgagccggaagcataaagtgtaaagcctggggtgcctaatgagtgagctaactcacattaattgcgttgcgctcactgcccgctttccagtcgggaaacctgtcgtgccagctgcattaatgaatcggccaacgcgcggggagaggcggtttgcgtattgggcgctcttccgcttcctcgctcactgactcgctgcgctcggtcgttcggctgcggcgagcggtatcagctcactcaaaggcggtaatacggttatccacagaatcaggggataacgcaggaaagaacatgtgagcaaaaggccagcaaaaggccaggaaccgtaaaaaggccgcgttgctggcgtttttccataggctccgcccccctgacgagcatcacaaaaatcgacgctcaagtcagaggtggcgaaacccgacaggactataaagataccaggcgtttccccctggaagctccctcgtgcgctctcctgttccgaccctgccgcttaccggatacctgtccgcctttctcccttcgggaagcgtggcgctttctcatagctcacgctgtaggtatctcagttcggtgtaggtcgttcgctccaagctgggctgtgtgcacgaaccccccgttcagcccgaccgctgcgccttatccggtaactatcgtcttgagtccaacccggtaagacacgacttatcgccactggcagcagccactggtaacaggattagcagagcgaggtatgtaggcggtgctacagagttcttgaagtggtggcctaactacggctacactagaaggacagtatttggtatctgcgctctgctgaagccagttaccttcggaaaaagagttggtagctcttgatccggcaaacaaaccaccgctggtagcggtggtttttttgtttgcaagcagcagattacgcgcagaaaaaaaggatctcaagaagatcctttgatcttttctacggggtctgacgctcagtggaacgaaaactcacgttaagggattttggtcatgagattatcaaaaaggatcttcacctagatccttttaaattaaaaatgaagttttaaatcaatctaaagtatatatgagtaaacttggtctgacagttaccaatgcttaatcagtgaggcacctatctcagcgatctgtctatttcgttcatccatagttgcctgactccccgtcgtgtagataactacgatacgggagggcttaccatctggccccagtgctgcaatgataccgcgagacccacgctcaccggctccagatttatcagcaataaaccagccagccggaagggccgagcgcagaagtggtcctgcaactttatccgcctccatccagtctattaattgttgccgggaagctagagtaagtagttcgccagttaatagtttgcgcaacgttgttgccattgctacaggcatcgtggtgtcacgctcgtcgtttggtatggcttcattcagctccggttcccaacgatcaaggcgagttacatgatcccccatgttgtgcaaaaaagcggttagctccttcggtcctccgatcgttgtcagaagtaagttggccgcagtgttatcactcatggttatggcagcactgcataattctcttactgtcatgccatccgtaagatgcttttctgtgactggtgagtactcaaccaagtcattctgagaatagtgtatgcggcgaccgagttgctcttgcccggcgtcaatacgggataataccgcgccacatagcagaactttaaaagtgctcatcattggaaaacgttcttcggggcgaaaactctcaaggatcttaccgctgttgagatccagttcgatgtaacccactcgtgcacccaactgatcttcagcatcttttactttcaccagcgtttctgggtgagcaaaaacaggaaggcaaaatgccgcaaaaaagggaataagggcgacacggaaatgttgaatactcatactcttcctttttcaatattattgaagcatttatcagggttattgtctcatgagcggatacatatttgaatgtatttagaaaaataaacaaataggggttccgcgcacatttccccgaaaagtgccacctgacgtctaagaaaccattattatcatgacattaacctataaaaataggcgtatcacgaggccctttcgtc

SEQ ID NO: 401 - DNA, 3774 bp, synthetic construct
  source 1..3774: mol_type = other DNA
tcgagctcggtacccggggagatactgagaaggaacaatctgtgtggtaggacacaaacctggagaatatatcttgggaactgaagggaagaaagtaaaacatggaggaggggatgaacagccatgtcagattttgccaataagttaggtaggataaagactagaattgaaaattgtgtttagtaatgtaaaggcctttgttacatggtcttcagtaataaatagccaggttagcactatttatatatgtttttaatgggaatttttgatgtttacagtgtctcctttgcgatgttcagattttccaacctattggtggtatgggtgctggtgcaacggggagggctatggatggaccaaggctccttcttcttttgctcttgggcgttagtctgggtggagctaaagaggcatgccccaccggactttacacacattccggtgagtgttgcaaggcctgcaacctgggagaaggcgtcgctcaaccctgcggggcgaatcaaaccgtatgcgaaccttgcctcgattctgttacattctccgatgtcgtctctgcgacggaaccctgcaagccatgcacggaatgtgtcgggttgcaaagtatgtcagctccttgcgttgaagcagacgatgcggtgtgtagatgtgcctatgggtattatcaagacgaaacgacgggacggtgtgaagcatgtcgagtatgcgaggcgggcagtggcctcgtcttctcttgtcaggacaagcaaaacactgtctgtgaagaatgccctgatgggacttatagtgatgaggcgaatcacgtcgatccatgtcttccctgtactgtctgtgaagacactgagagacaattgcgagagtgtacgcgatgggccgacgcagagtgcgaggagatcccaggtcgatggataaccaggtcaacccctcctgagggatctgatagtaccgcgccctccacccaagaacccgaagctccacctgagcaagacctcatagcgtccacagtagcaggagttgtcacaaccgtcatgggaagttcacaaccagtagttaccaggggtaccacggataacctcattccggtgtactgcagcattctcgccgctgtggttgtcggacttgttgcatacattgccttcaaacgctggaatagccgcgccaagcgctcgggttcgggtgccaccaacttcagcctgctgaagcaggccggcgacgtggaggagaaccccggcccctctgacagtggttctcagctcggatctatgggtagcctcaccatgaaatcacagcttcagatcactggtaagttttagaaacatcggctgctttactttatttttccccgtatgattaaaaaataatcctgagagggccaggcatggtggcccatgcctgtaatcccagcactttgggaggctgaggtgggcgggtcacttgaggccaggagtttgagaccagccaagccaacatggagaatacaaaattagttgggcatggtggtgcacacctgctgtcccagctactccggaggctgatcctctagagtcgacctgcagaggctaggtggaggctcagtgatgataagtctgcgatggtggatgcatgtgtcatggtcatagctgtttcctgtgtgaaattgttatccgctcagagggcacaatcctattccgcgctatccgacaatctccaagacattaggtggagttcagttcggcgtatggcatatgtcgctggaaagaacatgtgagcaaaaggccagcaaaaggccaggaaccgtaaaaaggccgcgttgctggcgtttttccataggctccgcccccctgacgagcatcacaaaaatcgacgctcaagtcagaggtggcgaaacccgacaggactataaagataccaggcgtttccccctggaagctccctcgtgcgctctcctgttccgaccctgccgcttaccggatacctgtccgcctttctcccttcgggaagcgtggcgctttctcatagctcacgctgtaggtatctcagttcggtgtaggtcgttcgctccaagctgggctgtgtgcacgaaccccccgttcagcccgaccgctgcgccttatccggtaactatcgtcttgagtccaacccggtaagacacgacttatcgccactggcagcagccactggtaacaggattagcagagcgaggtatgtaggcggtgctacagagttcttgaagtggtggcctaactacggctacactagaagaacagtatttggtatctgcgctctgctgaagccagttaccttcggaaaaagagttggtagctcttgatccggcaaacaaaccaccgctggtagcggtggtttttttgtttgcaagcagcagattacgcgcagaaaaaaaggatctcaagaagatcctttgatcttttctacggggtctgacgctctattcaacaaagccgccgtcccgtcaagtcagcgtaaatgggtagggggcttcaaatcgtcctcgtgataccaattcggagcctgcttttttgtacaaacttgttgataatggcaattcaaggatcttcacctagatccttttaaattaaaaatgaagttttaaatcaatctaaagtatatatgagtaaacttggtctgacagttaccaatgcttaatcagtgaggcacctatctcagcgatctgtctatttcgttcatccatagttgcctgactccccgtcgtgtagataactacgatacgggagggcttaccatctggccccagtgctgcaatgataccgcgagagccacgctcaccggctccagatttatcagcaataaaccagccagccggaagggccgagcgcagaagtggtcctgcaactttatccgcctccatccagtctattaattgttgccgggaagctagagtaagtagttcgccagttaatagtttgcgcaacgttgttgccattgctacaggcatcgtggtgtcacgctcgtcgtttggtatggcttcattcagctccggttcccaacgatcaaggcgagttacatgatcccccatgttgtgcaaaaaagcggttagctccttcggtcctccgatcgttgtcagaagtaagttggccgcagtgttatcactcatggttatggcagcactgcataattctcttactgtcatgccatccgtaagatgcttttctgtgactggtgagtactcaaccaagtcattctgagaatagtgtatgcggcgaccgagttgctcttgcccggcgtcaatacgggataataccgcgccacatagcagaactttaaaagtgctcatcattggaaaacgttcttcggggcgaaaactctcaaggatcttaccgctgttgagatccagttcgatgtaacccactcgtgcacccaactgatcttcagcatcttttactttcaccagcgtttctgggtgagcaaaaacaggaaggcaaaatgccgcaaaaaagggaataagggcgacacggaaatgttgaatactcatactcttcctttttcaatattattgaagcatttatcagggttattgtctcatgagcggatacatatttgaatgtatttagaaaaataaacaaataggggttccgcgcacatttccccgaaaagtgccagatacctgaaacaaaacccatcgtacggccaaggaagtctccaataactgtgatccaccacaagcgccagggttttcccagtcacgacgttgtaaaacgacggccagtcatgcataatccgcacgcatctggaataaggaagtgccattccgcctgacct

SEQ ID NO: 402 - DNA, 3774 bp, synthetic construct
  source 1..3774: mol_type = other DNA
tcgagctcggtacccggggactctggtctgccccgccccaggccttgacctcctccctgtggagatgcaggggcagtgggggatacagggacgccctgctctcagggcagctctcagggaggcagtgctggggaggggtaggtgagaccgcccctcccaccgggcccacagcaccaccctggtctgaggcaccgcctccaggaagccctctctgagctctgagcgcctgcggtctcctgtgtgctgctctctgtggggtcctgtagacccagagaggctcagctgcactcgcccggctgcgagagctgggagtggccaccatgggtgctggtgcaacggggagggctatggatggaccaaggctccttcttcttttgctcttgggcgttagtctgggtggagctaaagaggcatgccccaccggactttacacacattccggtgagtgttgcaaggcctgcaacctgggagaaggcgtcgctcaaccctgcggggcgaatcaaaccgtatgcgaaccttgcctcgattctgttacattctccgatgtcgtctctgcgacggaaccctgcaagccatgcacggaatgtgtcgggttgcaaagtatgtcagctccttgcgttgaagcagacgatgcggtgtgtagatgtgcctatgggtattatcaagacgaaacgacgggacggtgtgaagcatgtcgagtatgcgaggcgggcagtggcctcgtcttctcttgtcaggacaagcaaaacactgtctgtgaagaatgccctgatgggacttatagtgatgaggcgaatcacgtcgatccatgtcttccctgtactgtctgtgaagacactgagagacaattgcgagagtgtacgcgatgggccgacgcagagtgcgaggagatcccaggtcgatggataaccaggtcaacccctcctgagggatctgatagtaccgcgccctccacccaagaacccgaagctccacctgagcaagacctcatagcgtccacagtagcaggagttgtcacaaccgtcatgggaagttcacaaccagtagttaccaggggtaccacggataacctcattccggtgtactgcagcattctcgccgctgtggttgtcggacttgttgcatacattgccttcaaacgctggaatagccgcgccaagcgctcgggttcgggtgccaccaacttcagcctgctgaagcaggccggcgacgtggaggagaaccccggccccgccgggcctccgagactgctcctcctgcccctgcttctggcgctggctcgcggcctgcctggggccctggctgcccaaggtaagagcttcccaggctctccatggccacagctccagagctctccctgccccatgagctcagagcccccagtctgagccacagcacagcccccaggaagcgggtggggtgctgagcggcctccagtgtctgaggactcatttaagagaaggaaaaagggtggaccccggtggggagtggccggggctgtccaggcagggccgctgctttgggaggaagaatcctctagagtcgacctgcagaggctaggtggaggctcagtgatgataagtctgcgatggtggatgcatgtgtcatggtcatagctgtttcctgtgtgaaattgttatccgctcagagggcacaatcctattccgcgctatccgacaatctccaagacattaggtggagttcagttcggcgtatggcatatgtcgctggaaagaacatgtgagcaaaaggccagcaaaaggccaggaaccgtaaaaaggccgcgttgctggcgtttttccataggctccgcccccctgacgagcatcacaaaaatcgacgctcaagtcagaggtggcgaaacccgacaggactataaagataccaggcgtttccccctggaagctccctcgtgcgctctcctgttccgaccctgccgcttaccggatacctgtccgcctttctcccttcgggaagcgtggcgctttctcatagctcacgctgtaggtatctcagttcggtgtaggtcgttcgctccaagctgggctgtgtgcacgaaccccccgttcagcccgaccgctgcgccttatccggtaactatcgtcttgagtccaacccggtaagacacgacttatcgccactggcagcagccactggtaacaggattagcagagcgaggtatgtaggcggtgctacagagttcttgaagtggtggcctaactacggctacactagaagaacagtatttggtatctgcgctctgctgaagccagttaccttcggaaaaagagttggtagctcttgatccggcaaacaaaccaccgctggtagcggtggtttttttgtttgcaagcagcagattacgcgcagaaaaaaaggatctcaagaagatcctttgatcttttctacggggtctgacgctctattcaacaaagccgccgtcccgtcaagtcagcgtaaatgggtagggggcttcaaatcgtcctcgtgataccaattcggagcctgcttttttgtacaaacttgttgataatggcaattcaaggatcttcacctagatccttttaaattaaaaatgaagttttaaatcaatctaaagtatatatgagtaaacttggtctgacagttaccaatgcttaatcagtgaggcacctatctcagcgatctgtctatttcgttcatccatagttgcctgactccccgtcgtgtagataactacgatacgggagggcttaccatctggccccagtgctgcaatgataccgcgagagccacgctcaccggctccagatttatcagcaataaaccagccagccggaagggccgagcgcagaagtggtcctgcaactttatccgcctccatccagtctattaattgttgccgggaagctagagtaagtagttcgccagttaatagtttgcgcaacgttgttgccattgctacaggcatcgtggtgtcacgctcgtcgtttggtatggcttcattcagctccggttcccaacgatcaaggcgagttacatgatcccccatgttgtgcaaaaaagcggttagctccttcggtcctccgatcgttgtcagaagtaagttggccgcagtgttatcactcatggttatggcagcactgcataattctcttactgtcatgccatccgtaagatgcttttctgtgactggtgagtactcaaccaagtcattctgagaatagtgtatgcggcgaccgagttgctcttgcccggcgtcaatacgggataataccgcgccacatagcagaactttaaaagtgctcatcattggaaaacgttcttcggggcgaaaactctcaaggatcttaccgctgttgagatccagttcgatgtaacccactcgtgcacccaactgatcttcagcatcttttactttcaccagcgtttctgggtgagcaaaaacaggaaggcaaaatgccgcaaaaaagggaataagggcgacacggaaatgttgaatactcatactcttcctttttcaatattattgaagcatttatcagggttattgtctcatgagcggatacatatttgaatgtatttagaaaaataaacaaataggggttccgcgcacatttccccgaaaagtgccagatacctgaaacaaaacccatcgtacggccaaggaagtctccaataactgtgatccaccacaagcgccagggttttcccagtcacgacgttgtaaaacgacggccagtcatgcataatccgcacgcatctggaataaggaagtgccattccgcctgacct

SEQ ID NO: 403 - DNA, 3774 bp, synthetic construct
  source 1..3774: mol_type = other DNA
tcgagctcggtacccggggaatttgctgtgcgtgctcctgtggggaggacatgcagtgtctgcctgggagaagaggcagctgaggccgtggcccggagtagtaggagccacaagccaccctgggcaggacgaggccctgagggaggtgagctttttgtacccgcaggtcgggaactcactcctgagcttcctgctgtccaaggaccccactgttttccagggagtcccttccaaaggtctcacccagctcagctgaggtaactcattttgccatttcttcatttttaggacaactgtcatctcggaagtaacaacgcaggatgggtgctggtgcaacggggagggctatggatggaccaaggctccttcttcttttgctcttgggcgttagtctgggtggagctaaagaggcatgccccaccggactttacacacattccggtgagtgttgcaaggcctgcaacctgggagaaggcgtcgctcaaccctgcggggcgaatcaaaccgtatgcgaaccttgcctcgattctgttacattctccgatgtcgtctctgcgacggaaccctgcaagccatgcacggaatgtgtcgggttgcaaagtatgtcagctccttgcgttgaagcagacgatgcggtgtgtagatgtgcctatgggtattatcaagacgaaacgacgggacggtgtgaagcatgtcgagtatgcgaggcgggcagtggcctcgtcttctcttgtcaggacaagcaaaacactgtctgtgaagaatgccctgatgggacttatagtgatgaggcgaatcacgtcgatccatgtcttccctgtactgtctgtgaagacactgagagacaattgcgagagtgtacgcgatgggccgacgcagagtgcgaggagatcccaggtcgatggataaccaggtcaacccctcctgagggatctgatagtaccgcgccctccacccaagaacccgaagctccacctgagcaagacctcatagcgtccacagtagcaggagttgtcacaaccgtcatgggaagttcacaaccagtagttaccaggggtaccacggataacctcattccggtgtactgcagcattctcgccgctgtggttgtcggacttgttgcatacattgccttcaaacgctggaatagccgcgccaagcgctcgggttcgggtgccaccaacttcagcctgctgaagcaggccggcgacgtggaggagaaccccgggcctccccctggcgtcgattgtcccatggaattctggaccaaggaggagaatcagagcgttgtggttgacttcctgctgcccacaggggtctacctgaacttccctgtgtcccgcaatgccaacctcagcaccatcaagcaggtatggcctccatccggtcctcagaccttggtgctcagagagagtgagagagagagagacacagatagacagacagacagacagacagatggacaggtggacagacggacagacagatggacagatgcactgcttttcagacttgggatcctcagatgagaatcctctagagtcgacctgcagaggctaggtggaggctcagtgatgataagtctgcgatggtggatgcatgtgtcatggtcatagctgtttcctgtgtgaaattgttatccgctcagagggcacaatcctattccgcgctatccgacaatctccaagacattaggtggagttcagttcggcgtatggcatatgtcgctggaaagaacatgtgagcaaaaggccagcaaaaggccaggaaccgtaaaaaggccgcgttgctggcgtttttccataggctccgcccccctgacgagcatcacaaaaatcgacgctcaagtcagaggtggcgaaacccgacaggactataaagataccaggcgtttccccctggaagctccctcgtgcgctctcctgttccgaccctgccgcttaccggatacctgtccgcctttctcccttcgggaagcgtggcgctttctcatagctcacgctgtaggtatctcagttcggtgtaggtcgttcgctccaagctgggctgtgtgcacgaaccccccgttcagcccgaccgctgcgccttatccggtaactatcgtcttgagtccaacccggtaagacacgacttatcgccactggcagcagccactggtaacaggattagcagagcgaggtatgtaggcggtgctacagagttcttgaagtggtggcctaactacggctacactagaagaacagtatttggtatctgcgctctgctgaagccagttaccttcggaaaaagagttggtagctcttgatccggcaaacaaaccaccgctggtagcggtggtttttttgtttgcaagcagcagattacgcgcagaaaaaaaggatctcaagaagatcctttgatcttttctacggggtctgacgctctattcaacaaagccgccgtcccgtcaagtcagcgtaaatgggtagggggcttcaaatcgtcctcgtgataccaattcggagcctgcttttttgtacaaacttgttgataatggcaattcaaggatcttcacctagatccttttaaattaaaaatgaagttttaaatcaatctaaagtatatatgagtaaacttggtctgacagttaccaatgcttaatcagtgaggcacctatctcagcgatctgtctatttcgttcatccatagttgcctgactccccgtcgtgtagataactacgatacgggagggcttaccatctggccccagtgctgcaatgataccgcgagagccacgctcaccggctccagatttatcagcaataaaccagccagccggaagggccgagcgcagaagtggtcctgcaactttatccgcctccatccagtctattaattgttgccgggaagctagagtaagtagttcgccagttaatagtttgcgcaacgttgttgccattgctacaggcatcgtggtgtcacgctcgtcgtttggtatggcttcattcagctccggttcccaacgatcaaggcgagttacatgatcccccatgttgtgcaaaaaagcggttagctccttcggtcctccgatcgttgtcagaagtaagttggccgcagtgttatcactcatggttatggcagcactgcataattctcttactgtcatgccatccgtaagatgcttttctgtgactggtgagtactcaaccaagtcattctgagaatagtgtatgcggcgaccgagttgctcttgcccggcgtcaatacgggataataccgcgccacatagcagaactttaaaagtgctcatcattggaaaacgttcttcggggcgaaaactctcaaggatcttaccgctgttgagatccagttcgatgtaacccactcgtgcacccaactgatcttcagcatcttttactttcaccagcgtttctgggtgagcaaaaacaggaaggcaaaatgccgcaaaaaagggaataagggcgacacggaaatgttgaatactcatactcttcctttttcaatattattgaagcatttatcagggttattgtctcatgagcggatacatatttgaatgtatttagaaaaataaacaaataggggttccgcgcacatttccccgaaaagtgccagatacctgaaacaaaacccatcgtacggccaaggaagtctccaataactgtgatccaccacaagcgccagggttttcccagtcacgacgttgtaaaacgacggccagtcatgcataatccgcacgcatctggaataaggaagtgccattccgcctgacct

SEQ ID NO: 404 - DNA, 3774 bp, synthetic construct
  source 1..3774: mol_type = other DNA
tcgagctcggtacccggggaccttccttcctctctcccctcccctgacactggagggggccccccattccattctggcatgaggcttattcggtgcctcaccatttatgtacctggggtgataggggggtgggcgggactgtctgggctgtgagtggcacctcctgtggttcccccaggaatgggtggtgtggacagctgccaggcgttgaagaccacccctggctctgtgcccctgtctcatcagatgggggctccggaggtggcgcccaggctctgagctaccctaggtctgcagactagcgggcaatggcgagaaccatgggtgctggtgcaacggggagggctatggatggaccaaggctccttcttcttttgctcttgggcgttagtctgggtggagctaaagaggcatgccccaccggactttacacacattccggtgagtgttgcaaggcctgcaacctgggagaaggcgtcgctcaaccctgcggggcgaatcaaaccgtatgcgaaccttgcctcgattctgttacattctccgatgtcgtctctgcgacggaaccctgcaagccatgcacggaatgtgtcgggttgcaaagtatgtcagctccttgcgttgaagcagacgatgcggtgtgtagatgtgcctatgggtattatcaagacgaaacgacgggacggtgtgaagcatgtcgagtatgcgaggcgggcagtggcctcgtcttctcttgtcaggacaagcaaaacactgtctgtgaagaatgccctgatgggacttatagtgatgaggcgaatcacgtcgatccatgtcttccctgtactgtctgtgaagacactgagagacaattgcgagagtgtacgcgatgggccgacgcagagtgcgaggagatcccaggtcgatggataaccaggtcaacccctcctgagggatctgatagtaccgcgccctccacccaagaacccgaagctccacctgagcaagacctcatagcgtccacagtagcaggagttgtcacaaccgtcatgggaagttcacaaccagtagttaccaggggtaccacggataacctcattccggtgtactgcagcattctcgccgctgtggttgtcggacttgttgcatacattgccttcaaacgctggaatagccgcgccaagcgctcgggttcgggtgccaccaacttcagcctgctgaagcaggccggcgacgtggaggagaaccccggccccgcgcagccactggccttcatactcgatgtccctgagaccccaggggaccaggggtaagcgctctggggctgggggctggaggctggaatgttccaccccccacggagaggtcacctgagcaggggctgctggaaggagagaggtggctggagcctgacccccccgccaaccccctctgcagccagggccccagcccctatgatgaaagcgaagtgcacgactccttccagcagctcatccaggagcagagccagtgcacggcccaggaggggctggagctgcagcagagagagcgggaggtcctctagagtcgacctgcagaggctaggtggaggctcagtgatgataagtctgcgatggtggatgcatgtgtcatggtcatagctgtttcctgtgtgaaattgttatccgctcagagggcacaatcctattccgcgctatccgacaatctccaagacattaggtggagttcagttcggcgtatggcatatgtcgctggaaagaacatgtgagcaaaaggccagcaaaaggccaggaaccgtaaaaaggccgcgttgctggcgtttttccataggctccgcccccctgacgagcatcacaaaaatcgacgctcaagtcagaggtggcgaaacccgacaggactataaagataccaggcgtttccccctggaagctccctcgtgcgctctcctgttccgaccctgccgcttaccggatacctgtccgcctttctcccttcgggaagcgtggcgctttctcatagctcacgctgtaggtatctcagttcggtgtaggtcgttcgctccaagctgggctgtgtgcacgaaccccccgttcagcccgaccgctgcgccttatccggtaactatcgtcttgagtccaacccggtaagacacgacttatcgccactggcagcagccactggtaacaggattagcagagcgaggtatgtaggcggtgctacagagttcttgaagtggtggcctaactacggctacactagaagaacagtatttggtatctgcgctctgctgaagccagttaccttcggaaaaagagttggtagctcttgatccggcaaacaaaccaccgctggtagcggtggtttttttgtttgcaagcagcagattacgcgcagaaaaaaaggatctcaagaagatcctttgatcttttctacggggtctgacgctctattcaacaaagccgccgtcccgtcaagtcagcgtaaatgggtagggggcttcaaatcgtcctcgtgataccaattcggagcctgcttttttgtacaaacttgttgataatggcaattcaaggatcttcacctagatccttttaaattaaaaatgaagttttaaatcaatctaaagtatatatgagtaaacttggtctgacagttaccaatgcttaatcagtgaggcacctatctcagcgatctgtctatttcgttcatccatagttgcctgactccccgtcgtgtagataactacgatacgggagggcttaccatctggccccagtgctgcaatgataccgcgagagccacgctcaccggctccagatttatcagcaataaaccagccagccggaagggccgagcgcagaagtggtcctgcaactttatccgcctccatccagtctattaattgttgccgggaagctagagtaagtagttcgccagttaatagtttgcgcaacgttgttgccattgctacaggcatcgtggtgtcacgctcgtcgtttggtatggcttcattcagctccggttcccaacgatcaaggcgagttacatgatcccccatgttgtgcaaaaaagcggttagctccttcggtcctccgatcgttgtcagaagtaagttggccgcagtgttatcactcatggttatggcagcactgcataattctcttactgtcatgccatccgtaagatgcttttctgtgactggtgagtactcaaccaagtcattctgagaatagtgtatgcggcgaccgagttgctcttgcccggcgtcaatacgggataataccgcgccacatagcagaactttaaaagtgctcatcattggaaaacgttcttcggggcgaaaactctcaaggatcttaccgctgttgagatccagttcgatgtaacccactcgtgcacccaactgatcttcagcatcttttactttcaccagcgtttctgggtgagcaaaaacaggaaggcaaaatgccgcaaaaaagggaataagggcgacacggaaatgttgaatactcatactcttcctttttcaatattattgaagcatttatcagggttattgtctcatgagcggatacatatttgaatgtatttagaaaaataaacaaataggggttccgcgcacatttccccgaaaagtgccagatacctgaaacaaaacccatcgtacggccaaggaagtctccaataactgtgatccaccacaagcgccagggttttcccagtcacgacgttgtaaaacgacggccagtcatgcataatccgcacgcatctggaataaggaagtgccattccgcctgacct

SEQ ID NO: 405 - DNA, 3774 bp, synthetic construct
  source 1..3774: mol_type = other DNA
tcgagctcggtacccggggagagggtctgagccagtcagaaggagatgggccccagagagtaagaaagggggaggaggacccaagctgatccaaaaggtgggtctaagcagtcaagtggaggagggttccaatctgatggcggagggcccaagctcagcctaacgaggaggccaggcccaccaaggggcccctggaggacttgtttcccttgtcccttgtggttttttgcatttcctgttcccttgctgctcattgcggaagttcctcttcttaccctgcacccagagcctcgcgagagaagacaagggcagaaagcaccatgggtgctggtgcaacggggagggctatggatggaccaaggctccttcttcttttgctcttgggcgttagtctgggtggagctaaagaggcatgccccaccggactttacacacattccggtgagtgttgcaaggcctgcaacctgggagaaggcgtcgctcaaccctgcggggcgaatcaaaccgtatgcgaaccttgcctcgattctgttacattctccgatgtcgtctctgcgacggaaccctgcaagccatgcacggaatgtgtcgggttgcaaagtatgtcagctccttgcgttgaagcagacgatgcggtgtgtagatgtgcctatgggtattatcaagacgaaacgacgggacggtgtgaagcatgtcgagtatgcgaggcgggcagtggcctcgtcttctcttgtcaggacaagcaaaacactgtctgtgaagaatgccctgatgggacttatagtgatgaggcgaatcacgtcgatccatgtcttccctgtactgtctgtgaagacactgagagacaattgcgagagtgtacgcgatgggccgacgcagagtgcgaggagatcccaggtcgatggataaccaggtcaacccctcctgagggatctgatagtaccgcgccctccacccaagaacccgaagctccacctgagcaagacctcatagcgtccacagtagcaggagttgtcacaaccgtcatgggaagttcacaaccagtagttaccaggggtaccacggataacctcattccggtgtactgcagcattctcgccgctgtggttgtcggacttgttgcatacattgccttcaaacgctggaatagccgcgccaagcgctcgggttcgggtgccaccaacttcagcctgctgaagcaggccggcgacgtggaggagaaccccggccccagtggtggacctatgggggggagacctgggggccgaggagcaccagcggttcagcagaacataccctccaccctcctccaggaccacgagaaccagcgactctttgagatgcttggacgaaaatgcttggtgagctggggatctcctgcccccgccccgtccccaccgtttcttcctcttcctctcctccttctctctcttcccctcctcccgctcctcctttccctctccatcatctcctctcctagaatttcccgtcataatccacccttcccaggaagatctcaatgtctacttgcctcctctagagtcgacctgcagaggctaggtggaggctcagtgatgataagtctgcgatggtggatgcatgtgtcatggtcatagctgtttcctgtgtgaaattgttatccgctcagagggcacaatcctattccgcgctatccgacaatctccaagacattaggtggagttcagttcggcgtatggcatatgtcgctggaaagaacatgtgagcaaaaggccagcaaaaggccaggaaccgtaaaaaggccgcgttgctggcgtttttccataggctccgcccccctgacgagcatcacaaaaatcgacgctcaagtcagaggtggcgaaacccgacaggactataaagataccaggcgtttccccctggaagctccctcgtgcgctctcctgttccgaccctgccgcttaccggatacctgtccgcctttctcccttcgggaagcgtggcgctttctcatagctcacgctgtaggtatctcagttcggtgtaggtcgttcgctccaagctgggctgtgtgcacgaaccccccgttcagcccgaccgctgcgccttatccggtaactatcgtcttgagtccaacccggtaagacacgacttatcgccactggcagcagccactggtaacaggattagcagagcgaggtatgtaggcggtgctacagagttcttgaagtggtggcctaactacggctacactagaagaacagtatttggtatctgcgctctgctgaagccagttaccttcggaaaaagagttggtagctcttgatccggcaaacaaaccaccgctggtagcggtggtttttttgtttgcaagcagcagattacgcgcagaaaaaaaggatctcaagaagatcctttgatcttttctacggggtctgacgctctattcaacaaagccgccgtcccgtcaagtcagcgtaaatgggtagggggcttcaaatcgtcctcgtgataccaattcggagcctgcttttttgtacaaacttgttgataatggcaattcaaggatcttcacctagatccttttaaattaaaaatgaagttttaaatcaatctaaagtatatatgagtaaacttggtctgacagttaccaatgcttaatcagtgaggcacctatctcagcgatctgtctatttcgttcatccatagttgcctgactccccgtcgtgtagataactacgatacgggagggcttaccatctggccccagtgctgcaatgataccgcgagagccacgctcaccggctccagatttatcagcaataaaccagccagccggaagggccgagcgcagaagtggtcctgcaactttatccgcctccatccagtctattaattgttgccgggaagctagagtaagtagttcgccagttaatagtttgcgcaacgttgttgccattgctacaggcatcgtggtgtcacgctcgtcgtttggtatggcttcattcagctccggttcccaacgatcaaggcgagttacatgatcccccatgttgtgcaaaaaagcggttagctccttcggtcctccgatcgttgtcagaagtaagttggccgcagtgttatcactcatggttatggcagcactgcataattctcttactgtcatgccatccgtaagatgcttttctgtgactggtgagtactcaaccaagtcattctgagaatagtgtatgcggcgaccgagttgctcttgcccggcgtcaatacgggataataccgcgccacatagcagaactttaaaagtgctcatcattggaaaacgttcttcggggcgaaaactctcaaggatcttaccgctgttgagatccagttcgatgtaacccactcgtgcacccaactgatcttcagcatcttttactttcaccagcgtttctgggtgagcaaaaacaggaaggcaaaatgccgcaaaaaagggaataagggcgacacggaaatgttgaatactcatactcttcctttttcaatattattgaagcatttatcagggttattgtctcatgagcggatacatatttgaatgtatttagaaaaataaacaaataggggttccgcgcacatttccccgaaaagtgccagatacctgaaacaaaacccatcgtacggccaaggaagtctccaataactgtgatccaccacaagcgccagggttttcccagtcacgacgttgtaaaacgacggccagtcatgcataatccgcacgcatctggaataaggaagtgccattccgcctgacct

SEQ ID NO: 406 - DNA, 3774 bp, synthetic construct
  source 1..3774: mol_type = other DNA
tcgagctcggtacccggggaccattgcggttccctgtgcaagatgagtctctgagtgggaatccagcactctctccctcttcttccccaccaccttcaccctccttaacggaaaaacaaaaggcatctgcacctgcagccctgctgaggcccctgctgctcacacttgcagcagagggtggaggctctgggttcttgccttctctcaaaggccccagccccaacagtgatgggtggagccagtctagctgctgcacaggctggctggctggctggctgctaagggctgctccacgcttttgcgggaggacacagcctaacatgggtgctggtgcaacggggagggctatggatggaccaaggctccttcttcttttgctcttgggcgttagtctgggtggagctaaagaggcatgccccaccggactttacacacattccggtgagtgttgcaaggcctgcaacctgggagaaggcgtcgctcaaccctgcggggcgaatcaaaccgtatgcgaaccttgcctcgattctgttacattctccgatgtcgtctctgcgacggaaccctgcaagccatgcacggaatgtgtcgggttgcaaagtatgtcagctccttgcgttgaagcagacgatgcggtgtgtagatgtgcctatgggtattatcaagacgaaacgacgggacggtgtgaagcatgtcgagtatgcgaggcgggcagtggcctcgtcttctcttgtcaggacaagcaaaacactgtctgtgaagaatgccctgatgggacttatagtgatgaggcgaatcacgtcgatccatgtcttccctgtactgtctgtgaagacactgagagacaattgcgagagtgtacgcgatgggccgacgcagagtgcgaggagatcccaggtcgatggataaccaggtcaacccctcctgagggatctgatagtaccgcgccctccacccaagaacccgaagctccacctgagcaagacctcatagcgtccacagtagcaggagttgtcacaaccgtcatgggaagttcacaaccagtagttaccaggggtaccacggataacctcattccggtgtactgcagcattctcgccgctgtggttgtcggacttgttgcatacattgccttcaaacgctggaatagccgcgccaagcgctcgggttcgggtgccaccaacttcagcctgctgaagcaggccggcgacgtggaggagaaccccggccccgaacaggggaaaggcctcgctgtcctcatcctggctatcattcttcttcaaggtaagggcctactaggggtctggaagcctggggaagggctcaagggaagagcccatcactagtgagacaggaatattggtatccctaaccttcagcctacctctgctgtcaccttagagttcaaagaagggcaaaatggaggctcttaactgttctctgctagagagaaacagtgtcccatggaggagaaggaatccttgtctctgaaaaatgcaaacagagtacttaaatggctgaagagaggaccctcctctagagtcgacctgcagaggctaggtggaggctcagtgatgataagtctgcgatggtggatgcatgtgtcatggtcatagctgtttcctgtgtgaaattgttatccgctcagagggcacaatcctattccgcgctatccgacaatctccaagacattaggtggagttcagttcggcgtatggcatatgtcgctggaaagaacatgtgagcaaaaggccagcaaaaggccaggaaccgtaaaaaggccgcgttgctggcgtttttccataggctccgcccccctgacgagcatcacaaaaatcgacgctcaagtcagaggtggcgaaacccgacaggactataaagataccaggcgtttccccctggaagctccctcgtgcgctctcctgttccgaccctgccgcttaccggatacctgtccgcctttctcccttcgggaagcgtggcgctttctcatagctcacgctgtaggtatctcagttcggtgtaggtcgttcgctccaagctgggctgtgtgcacgaaccccccgttcagcccgaccgctgcgccttatccggtaactatcgtcttgagtccaacccggtaagacacgacttatcgccactggcagcagccactggtaacaggattagcagagcgaggtatgtaggcggtgctacagagttcttgaagtggtggcctaactacggctacactagaagaacagtatttggtatctgcgctctgctgaagccagttaccttcggaaaaagagttggtagctcttgatccggcaaacaaaccaccgctggtagcggtggtttttttgtttgcaagcagcagattacgcgcagaaaaaaaggatctcaagaagatcctttgatcttttctacggggtctgacgctctattcaacaaagccgccgtcccgtcaagtcagcgtaaatgggtagggggcttcaaatcgtcctcgtgataccaattcggagcctgcttttttgtacaaacttgttgataatggcaattcaaggatcttcacctagatccttttaaattaaaaatgaagttttaaatcaatctaaagtatatatgagtaaacttggtctgacagttaccaatgcttaatcagtgaggcacctatctcagcgatctgtctatttcgttcatccatagttgcctgactccccgtcgtgtagataactacgatacgggagggcttaccatctggccccagtgctgcaatgataccgcgagagccacgctcaccggctccagatttatcagcaataaaccagccagccggaagggccgagcgcagaagtggtcctgcaactttatccgcctccatccagtctattaattgttgccgggaagctagagtaagtagttcgccagttaatagtttgcgcaacgttgttgccattgctacaggcatcgtggtgtcacgctcgtcgtttggtatggcttcattcagctccggttcccaacgatcaaggcgagttacatgatcccccatgttgtgcaaaaaagcggttagctccttcggtcctccgatcgttgtcagaagtaagttggccgcagtgttatcactcatggttatggcagcactgcataattctcttactgtcatgccatccgtaagatgcttttctgtgactggtgagtactcaaccaagtcattctgagaatagtgtatgcggcgaccgagttgctcttgcccggcgtcaatacgggataataccgcgccacatagcagaactttaaaagtgctcatcattggaaaacgttcttcggggcgaaaactctcaaggatcttaccgctgttgagatccagttcgatgtaacccactcgtgcacccaactgatcttcagcatcttttactttcaccagcgtttctgggtgagcaaaaacaggaaggcaaaatgccgcaaaaaagggaataagggcgacacggaaatgttgaatactcatactcttcctttttcaatattattgaagcatttatcagggttattgtctcatgagcggatacatatttgaatgtatttagaaaaataaacaaataggggttccgcgcacatttccccgaaaagtgccagatacctgaaacaaaacccatcgtacggccaaggaagtctccaataactgtgatccaccacaagcgccagggttttcccagtcacgacgttgtaaaacgacggccagtcatgcataatccgcacgcatctggaataaggaagtgccattccgcctgacct

SEQ ID NO: 407 - DNA, 3774 bp, synthetic construct
  source 1..3774: mol_type = other DNA
tcgagctcggtacccggggaaaaatccttcttccaatgttcctcccctctctgtatgaaccctgtgttggggggcagaagatggaagcccttggcaagctcgatcgaaccaagctactaaattgctgagctcgttttaactgaagtgtgagaaggaggtttaaggcaagtagacaacatcctgttgttggggtgcttctctcttttttgcacatctggctgaactgggagtcaggtggttgacttgtgcctggctgcagtagcagcggcatctcccttgcacagttctcctcctccgcgtgcccaagagtccacgacgccatgggtgctggtgcaacggggagggctatggatggaccaaggctccttcttcttttgctcttgggcgttagtctgggtggagctaaagaggcatgccccaccggactttacacacattccggtgagtgttgcaaggcctgcaacctgggagaaggcgtcgctcaaccctgcggggcgaatcaaaccgtatgcgaaccttgcctcgattctgttacattctccgatgtcgtctctgcgacggaaccctgcaagccatgcacggaatgtgtcgggttgcaaagtatgtcagctccttgcgttgaagcagacgatgcggtgtgtagatgtgcctatgggtattatcaagacgaaacgacgggacggtgtgaagcatgtcgagtatgcgaggcgggcagtggcctcgtcttctcttgtcaggacaagcaaaacactgtctgtgaagaatgccctgatgggacttatagtgatgaggcgaatcacgtcgatccatgtcttccctgtactgtctgtgaagacactgagagacaattgcgagagtgtacgcgatgggccgacgcagagtgcgaggagatcccaggtcgatggataaccaggtcaacccctcctgagggatctgatagtaccgcgccctccacccaagaacccgaagctccacctgagcaagacctcatagcgtccacagtagcaggagttgtcacaaccgtcatgggaagttcacaaccagtagttaccaggggtaccacggataacctcattccggtgtactgcagcattctcgccgctgtggttgtcggacttgttgcatacattgccttcaaacgctggaatagccgcgccaagcgctcgggttcgggtgccaccaacttcagcctgctgaagcaggccggcgacgtggaggagaaccccggccccgacgcagtggctgtgtatcatggcaaaatcagcagggaaaccggcgagaagctcctgcttgccactgggctggatggcagctatttgctgagggacagcgagagcgtgccaggcgtgtactgcctatgtgtgctgtgagtatgatacggtggacatgggcctgctgagggtgtgggcggtgggcaacagcagctggggccagggtggaggccgaggcaggcaggggcgccggcgttagcagctcgccgacgcctcctccgtggcccaccctcaagtccagcccagggccgtggtggaacatcctctagagtcgacctgcagaggctaggtggaggctcagtgatgataagtctgcgatggtggatgcatgtgtcatggtcatagctgtttcctgtgtgaaattgttatccgctcagagggcacaatcctattccgcgctatccgacaatctccaagacattaggtggagttcagttcggcgtatggcatatgtcgctggaaagaacatgtgagcaaaaggccagcaaaaggccaggaaccgtaaaaaggccgcgttgctggcgtttttccataggctccgcccccctgacgagcatcacaaaaatcgacgctcaagtcagaggtggcgaaacccgacaggactataaagataccaggcgtttccccctggaagctccctcgtgcgctctcctgttccgaccctgccgcttaccggatacctgtccgcctttctcccttcgggaagcgtggcgctttctcatagctcacgctgtaggtatctcagttcggtgtaggtcgttcgctccaagctgggctgtgtgcacgaaccccccgttcagcccgaccgctgcgccttatccggtaactatcgtcttgagtccaacccggtaagacacgacttatcgccactggcagcagccactggtaacaggattagcagagcgaggtatgtaggcggtgctacagagttcttgaagtggtggcctaactacggctacactagaagaacagtatttggtatctgcgctctgctgaagccagttaccttcggaaaaagagttggtagctcttgatccggcaaacaaaccaccgctggtagcggtggtttttttgtttgcaagcagcagattacgcgcagaaaaaaaggatctcaagaagatcctttgatcttttctacggggtctgacgctctattcaacaaagccgccgtcccgtcaagtcagcgtaaatgggtagggggcttcaaatcgtcctcgtgataccaattcggagcctgcttttttgtacaaacttgttgataatggcaattcaaggatcttcacctagatccttttaaattaaaaatgaagttttaaatcaatctaaagtatatatgagtaaacttggtctgacagttaccaatgcttaatcagtgaggcacctatctcagcgatctgtctatttcgttcatccatagttgcctgactccccgtcgtgtagataactacgatacgggagggcttaccatctggccccagtgctgcaatgataccgcgagagccacgctcaccggctccagatttatcagcaataaaccagccagccggaagggccgagcgcagaagtggtcctgcaactttatccgcctccatccagtctattaattgttgccgggaagctagagtaagtagttcgccagttaatagtttgcgcaacgttgttgccattgctacaggcatcgtggtgtcacgctcgtcgtttggtatggcttcattcagctccggttcccaacgatcaaggcgagttacatgatcccccatgttgtgcaaaaaagcggttagctccttcggtcctccgatcgttgtcagaagtaagttggccgcagtgttatcactcatggttatggcagcactgcataattctcttactgtcatgccatccgtaagatgcttttctgtgactggtgagtactcaaccaagtcattctgagaatagtgtatgcggcgaccgagttgctcttgcccggcgtcaatacgggataataccgcgccacatagcagaactttaaaagtgctcatcattggaaaacgttcttcggggcgaaaactctcaaggatcttaccgctgttgagatccagttcgatgtaacccactcgtgcacccaactgatcttcagcatcttttactttcaccagcgtttctgggtgagcaaaaacaggaaggcaaaatgccgcaaaaaagggaataagggcgacacggaaatgttgaatactcatactcttcctttttcaatattattgaagcatttatcagggttattgtctcatgagcggatacatatttgaatgtatttagaaaaataaacaaataggggttccgcgcacatttccccgaaaagtgccagatacctgaaacaaaacccatcgtacggccaaggaagtctccaataactgtgatccaccacaagcgccagggttttcccagtcacgacgttgtaaaacgacggccagtcatgcataatccgcacgcatctggaataaggaagtgccattccgcctgacct

SEQ ID NO: 408 - DNA, 3774 bp, synthetic construct
  source 1..3774: mol_type = other DNA
tcgagctcggtacccggggagcacggtggtcctgagtgagccccttcttacccggcctcagtctgcccgcctgtaggatgggagcggattggactacatggtctctgagggccctcgcggctcaagcgccagcgctggagagagagtctgagggtaccacgggcgtgctggcctgggtgctcactcccgccctccttcatgagcggctttcctctgggtgtgtccagggcatcacagagctcttctgcccaaacccggaggcctaccagggcctgcccaccttgcgtcgttccacactctctgtagcagcagccgcagccatgggtgctggtgcaacggggagggctatggatggaccaaggctccttcttcttttgctcttgggcgttagtctgggtggagctaaagaggcatgccccaccggactttacacacattccggtgagtgttgcaaggcctgcaacctgggagaaggcgtcgctcaaccctgcggggcgaatcaaaccgtatgcgaaccttgcctcgattctgttacattctccgatgtcgtctctgcgacggaaccctgcaagccatgcacggaatgtgtcgggttgcaaagtatgtcagctccttgcgttgaagcagacgatgcggtgtgtagatgtgcctatgggtattatcaagacgaaacgacgggacggtgtgaagcatgtcgagtatgcgaggcgggcagtggcctcgtcttctcttgtcaggacaagcaaaacactgtctgtgaagaatgccctgatgggacttatagtgatgaggcgaatcacgtcgatccatgtcttccctgtactgtctgtgaagacactgagagacaattgcgagagtgtacgcgatgggccgacgcagagtgcgaggagatcccaggtcgatggataaccaggtcaacccctcctgagggatctgatagtaccgcgccctccacccaagaacccgaagctccacctgagcaagacctcatagcgtccacagtagcaggagttgtcacaaccgtcatgggaagttcacaaccagtagttaccaggggtaccacggataacctcattccggtgtactgcagcattctcgccgctgtggttgtcggacttgttgcatacattgccttcaaacgctggaatagccgcgccaagcgctcgggttcgggtgccaccaacttcagcctgctgaagcaggccggcgacgtggaggagaaccccggccccgcggggatgaaaactgcttctggggactacatcgactcgtcatgggagctgcgggtgtttgtgggagaggaggacccagaggccgagtcggtcaccctgcgggtcactggggagtcgcacatcggcggggtgctcctgaagattgtggagcagatcagtgagtgtccgctgcccgcttgctgaactcggcaccatgggcggccgccacgggtgtctctgggcacttccgggccatccctgctgctcagctcccgataatggtgtcacggtgactcaggcattagcttaatcatttggttctcctctagagtcgacctgcagaggctaggtggaggctcagtgatgataagtctgcgatggtggatgcatgtgtcatggtcatagctgtttcctgtgtgaaattgttatccgctcagagggcacaatcctattccgcgctatccgacaatctccaagacattaggtggagttcagttcggcgtatggcatatgtcgctggaaagaacatgtgagcaaaaggccagcaaaaggccaggaaccgtaaaaaggccgcgttgctggcgtttttccataggctccgcccccctgacgagcatcacaaaaatcgacgctcaagtcagaggtggcgaaacccgacaggactataaagataccaggcgtttccccctggaagctccctcgtgcgctctcctgttccgaccctgccgcttaccggatacctgtccgcctttctcccttcgggaagcgtggcgctttctcatagctcacgctgtaggtatctcagttcggtgtaggtcgttcgctccaagctgggctgtgtgcacgaaccccccgttcagcccgaccgctgcgccttatccggtaactatcgtcttgagtccaacccggtaagacacgacttatcgccactggcagcagccactggtaacaggattagcagagcgaggtatgtaggcggtgctacagagttcttgaagtggtggcctaactacggctacactagaagaacagtatttggtatctgcgctctgctgaagccagttaccttcggaaaaagagttggtagctcttgatccggcaaacaaaccaccgctggtagcggtggtttttttgtttgcaagcagcagattacgcgcagaaaaaaaggatctcaagaagatcctttgatcttttctacggggtctgacgctctattcaacaaagccgccgtcccgtcaagtcagcgtaaatgggtagggggcttcaaatcgtcctcgtgataccaattcggagcctgcttttttgtacaaacttgttgataatggcaattcaaggatcttcacctagatccttttaaattaaaaatgaagttttaaatcaatctaaagtatatatgagtaaacttggtctgacagttaccaatgcttaatcagtgaggcacctatctcagcgatctgtctatttcgttcatccatagttgcctgactccccgtcgtgtagataactacgatacgggagggcttaccatctggccccagtgctgcaatgataccgcgagagccacgctcaccggctccagatttatcagcaataaaccagccagccggaagggccgagcgcagaagtggtcctgcaactttatccgcctccatccagtctattaattgttgccgggaagctagagtaagtagttcgccagttaatagtttgcgcaacgttgttgccattgctacaggcatcgtggtgtcacgctcgtcgtttggtatggcttcattcagctccggttcccaacgatcaaggcgagttacatgatcccccatgttgtgcaaaaaagcggttagctccttcggtcctccgatcgttgtcagaagtaagttggccgcagtgttatcactcatggttatggcagcactgcataattctcttactgtcatgccatccgtaagatgcttttctgtgactggtgagtactcaaccaagtcattctgagaatagtgtatgcggcgaccgagttgctcttgcccggcgtcaatacgggataataccgcgccacatagcagaactttaaaagtgctcatcattggaaaacgttcttcggggcgaaaactctcaaggatcttaccgctgttgagatccagttcgatgtaacccactcgtgcacccaactgatcttcagcatcttttactttcaccagcgtttctgggtgagcaaaaacaggaaggcaaaatgccgcaaaaaagggaataagggcgacacggaaatgttgaatactcatactcttcctttttcaatattattgaagcatttatcagggttattgtctcatgagcggatacatatttgaatgtatttagaaaaataaacaaataggggttccgcgcacatttccccgaaaagtgccagatacctgaaacaaaacccatcgtacggccaaggaagtctccaataactgtgatccaccacaagcgccagggttttcccagtcacgacgttgtaaaacgacggccagtcatgcataatccgcacgcatctggaataaggaagtgccattccgcctgacct

SEQ ID NO: 409 - DNA, 3774 bp, synthetic construct
  source 1..3774: mol_type = other DNA
tcgagctcggtacccggggattctaaatgagtctttgaaagattctgttctagcaacttcaagccattttggactccgaaaactccgcaatatttcacaactgcgcatgcgtgcttggaaagcgtcagcgcgctagatgtttacgtatcgagaaaggggcgggtcattatctttagcggaccaatgaaaacgctccagattatcttttttctattggccgaccggggccaattagaaatcaaccttcttttagcgggcgtgtagcgccagcgcgctgtgacgtaatgtgaggggtctcgccgcagggctgagctcgaccaatgggtgctggtgcaacggggagggctatggatggaccaaggctccttcttcttttgctcttgggcgttagtctgggtggagctaaagaggcatgccccaccggactttacacacattccggtgagtgttgcaaggcctgcaacctgggagaaggcgtcgctcaaccctgcggggcgaatcaaaccgtatgcgaaccttgcctcgattctgttacattctccgatgtcgtctctgcgacggaaccctgcaagccatgcacggaatgtgtcgggttgcaaagtatgtcagctccttgcgttgaagcagacgatgcggtgtgtagatgtgcctatgggtattatcaagacgaaacgacgggacggtgtgaagcatgtcgagtatgcgaggcgggcagtggcctcgtcttctcttgtcaggacaagcaaaacactgtctgtgaagaatgccctgatgggacttatagtgatgaggcgaatcacgtcgatccatgtcttccctgtactgtctgtgaagacactgagagacaattgcgagagtgtacgcgatgggccgacgcagagtgcgaggagatcccaggtcgatggataaccaggtcaacccctcctgagggatctgatagtaccgcgccctccacccaagaacccgaagctccacctgagcaagacctcatagcgtccacagtagcaggagttgtcacaaccgtcatgggaagttcacaaccagtagttaccaggggtaccacggataacctcattccggtgtactgcagcattctcgccgctgtggttgtcggacttgttgcatacattgccttcaaacgctggaatagccgcgccaagcgctcgggttcgggtgccaccaacttcagcctgctgaagcaggccggcgacgtggaggagaaccccggccccaggaaaggcaaggggccgatttgcctgttctcacgccccaccctcagacctagccggagcaaagtttcacttatagaagggagaggagcgaacatggcagcgcgttggcggttttggtgtgtctctgtgaccatggtggtggcgctgctcatcgtttgcgacgttccctcagcctctgcccaaagaaagaaggaggtgagaacgcggtttccagcagcatgggcttttcccaatgactggggcttaagagggtctgttcgcctcttcccagccccctttccctgccgcttctatgccttttcctctagagtcgacctgcagaggctaggtggaggctcagtgatgataagtctgcgatggtggatgcatgtgtcatggtcatagctgtttcctgtgtgaaattgttatccgctcagagggcacaatcctattccgcgctatccgacaatctccaagacattaggtggagttcagttcggcgtatggcatatgtcgctggaaagaacatgtgagcaaaaggccagcaaaaggccaggaaccgtaaaaaggccgcgttgctggcgtttttccataggctccgcccccctgacgagcatcacaaaaatcgacgctcaagtcagaggtggcgaaacccgacaggactataaagataccaggcgtttccccctggaagctccctcgtgcgctctcctgttccgaccctgccgcttaccggatacctgtccgcctttctcccttcgggaagcgtggcgctttctcatagctcacgctgtaggtatctcagttcggtgtaggtcgttcgctccaagctgggctgtgtgcacgaaccccccgttcagcccgaccgctgcgccttatccggtaactatcgtcttgagtccaacccggtaagacacgacttatcgccactggcagcagccactggtaacaggattagcagagcgaggtatgtaggcggtgctacagagttcttgaagtggtggcctaactacggctacactagaagaacagtatttggtatctgcgctctgctgaagccagttaccttcggaaaaagagttggtagctcttgatccggcaaacaaaccaccgctggtagcggtggtttttttgtttgcaagcagcagattacgcgcagaaaaaaaggatctcaagaagatcctttgatcttttctacggggtctgacgctctattcaacaaagccgccgtcccgtcaagtcagcgtaaatgggtagggggcttcaaatcgtcctcgtgataccaattcggagcctgcttttttgtacaaacttgttgataatggcaattcaaggatcttcacctagatccttttaaattaaaaatgaagttttaaatcaatctaaagtatatatgagtaaacttggtctgacagttaccaatgcttaatcagtgaggcacctatctcagcgatctgtctatttcgttcatccatagttgcctgactccccgtcgtgtagataactacgatacgggagggcttaccatctggccccagtgctgcaatgataccgcgagagccacgctcaccggctccagatttatcagcaataaaccagccagccggaagggccgagcgcagaagtggtcctgcaactttatccgcctccatccagtctattaattgttgccgggaagctagagtaagtagttcgccagttaatagtttgcgcaacgttgttgccattgctacaggcatcgtggtgtcacgctcgtcgtttggtatggcttcattcagctccggttcccaacgatcaaggcgagttacatgatcccccatgttgtgcaaaaaagcggttagctccttcggtcctccgatcgttgtcagaagtaagttggccgcagtgttatcactcatggttatggcagcactgcataattctcttactgtcatgccatccgtaagatgcttttctgtgactggtgagtactcaaccaagtcattctgagaatagtgtatgcggcgaccgagttgctcttgcccggcgtcaatacgggataataccgcgccacatagcagaactttaaaagtgctcatcattggaaaacgttcttcggggcgaaaactctcaaggatcttaccgctgttgagatccagttcgatgtaacccactcgtgcacccaactgatcttcagcatcttttactttcaccagcgtttctgggtgagcaaaaacaggaaggcaaaatgccgcaaaaaagggaataagggcgacacggaaatgttgaatactcatactcttcctttttcaatattattgaagcatttatcagggttattgtctcatgagcggatacatatttgaatgtatttagaaaaataaacaaataggggttccgcgcacatttccccgaaaagtgccagatacctgaaacaaaacccatcgtacggccaaggaagtctccaataactgtgatccaccacaagcgccagggttttcccagtcacgacgttgtaaaacgacggccagtcatgcataatccgcacgcatctggaataaggaagtgccattccgcctgacct

SEQ ID NO: 410 - DNA, 3774 bp, synthetic construct
  source 1..3774: mol_type = other DNA
tcgagctcggtacccggggaggcctactgtagtgggtgggggaatggagccgagtaaggcactggatgtggcctccattctctccaagcacctcgggtcagaagcccctctgccgggatccttccagaacagtaatgttttagcagtgaggtgtaaaggtaagcccatctcttctaagagttgagctaggtggagctgtcactttggtgggaaagtgaagacagattaggacagtattactaagattacatctaatacatgatcgcattcttgtttttccagatttatcagcaagactgttgaacgcataactgcccaagatgggtgctggtgcaacggggagggctatggatggaccaaggctccttcttcttttgctcttgggcgttagtctgggtggagctaaagaggcatgccccaccggactttacacacattccggtgagtgttgcaaggcctgcaacctgggagaaggcgtcgctcaaccctgcggggcgaatcaaaccgtatgcgaaccttgcctcgattctgttacattctccgatgtcgtctctgcgacggaaccctgcaagccatgcacggaatgtgtcgggttgcaaagtatgtcagctccttgcgttgaagcagacgatgcggtgtgtagatgtgcctatgggtattatcaagacgaaacgacgggacggtgtgaagcatgtcgagtatgcgaggcgggcagtggcctcgtcttctcttgtcaggacaagcaaaacactgtctgtgaagaatgccctgatgggacttatagtgatgaggcgaatcacgtcgatccatgtcttccctgtactgtctgtgaagacactgagagacaattgcgagagtgtacgcgatgggccgacgcagagtgcgaggagatcccaggtcgatggataaccaggtcaacccctcctgagggatctgatagtaccgcgccctccacccaagaacccgaagctccacctgagcaagacctcatagcgtccacagtagcaggagttgtcacaaccgtcatgggaagttcacaaccagtagttaccaggggtaccacggataacctcattccggtgtactgcagcattctcgccgctgtggttgtcggacttgttgcatacattgccttcaaacgctggaatagccgcgccaagcgctcgggttcgggtgccaccaacttcagcctgctgaagcaggccggcgacgtggaggagaaccccggcccccctgtgccccctccacctgctcccccgcccactcctacgtttgcactggtgagtgtctcctccccaaacactttctatgcataaagcaagccaaatgaagccaaaacctggcgtgcatgtgtttgtattaaatgtgtttgcattctggctcacatgtgatacaacaggctttcccagtgcccagggtaagccaaatcctgaaacccagcaaatacaaacaacacgaagggttttgtttgtttaaggtctcgtgtgatggatagtacaagggtggaatgtggctgatgaggtgttttctgctcctctagagtcgacctgcagaggctaggtggaggctcagtgatgataagtctgcgatggtggatgcatgtgtcatggtcatagctgtttcctgtgtgaaattgttatccgctcagagggcacaatcctattccgcgctatccgacaatctccaagacattaggtggagttcagttcggcgtatggcatatgtcgctggaaagaacatgtgagcaaaaggccagcaaaaggccaggaaccgtaaaaaggccgcgttgctggcgtttttccataggctccgcccccctgacgagcatcacaaaaatcgacgctcaagtcagaggtggcgaaacccgacaggactataaagataccaggcgtttccccctggaagctccctcgtgcgctctcctgttccgaccctgccgcttaccggatacctgtccgcctttctcccttcgggaagcgtggcgctttctcatagctcacgctgtaggtatctcagttcggtgtaggtcgttcgctccaagctgggctgtgtgcacgaaccccccgttcagcccgaccgctgcgccttatccggtaactatcgtcttgagtccaacccggtaagacacgacttatcgccactggcagcagccactggtaacaggattagcagagcgaggtatgtaggcggtgctacagagttcttgaagtggtggcctaactacggctacactagaagaacagtatttggtatctgcgctctgctgaagccagttaccttcggaaaaagagttggtagctcttgatccggcaaacaaaccaccgctggtagcggtggtttttttgtttgcaagcagcagattacgcgcagaaaaaaaggatctcaagaagatcctttgatcttttctacggggtctgacgctctattcaacaaagccgccgtcccgtcaagtcagcgtaaatgggtagggggcttcaaatcgtcctcgtgataccaattcggagcctgcttttttgtacaaacttgttgataatggcaattcaaggatcttcacctagatccttttaaattaaaaatgaagttttaaatcaatctaaagtatatatgagtaaacttggtctgacagttaccaatgcttaatcagtgaggcacctatctcagcgatctgtctatttcgttcatccatagttgcctgactccccgtcgtgtagataactacgatacgggagggcttaccatctggccccagtgctgcaatgataccgcgagagccacgctcaccggctccagatttatcagcaataaaccagccagccggaagggccgagcgcagaagtggtcctgcaactttatccgcctccatccagtctattaattgttgccgggaagctagagtaagtagttcgccagttaatagtttgcgcaacgttgttgccattgctacaggcatcgtggtgtcacgctcgtcgtttggtatggcttcattcagctccggttcccaacgatcaaggcgagttacatgatcccccatgttgtgcaaaaaagcggttagctccttcggtcctccgatcgttgtcagaagtaagttggccgcagtgttatcactcatggttatggcagcactgcataattctcttactgtcatgccatccgtaagatgcttttctgtgactggtgagtactcaaccaagtcattctgagaatagtgtatgcggcgaccgagttgctcttgcccggcgtcaatacgggataataccgcgccacatagcagaactttaaaagtgctcatcattggaaaacgttcttcggggcgaaaactctcaaggatcttaccgctgttgagatccagttcgatgtaacccactcgtgcacccaactgatcttcagcatcttttactttcaccagcgtttctgggtgagcaaaaacaggaaggcaaaatgccgcaaaaaagggaataagggcgacacggaaatgttgaatactcatactcttcctttttcaatattattgaagcatttatcagggttattgtctcatgagcggatacatatttgaatgtatttagaaaaataaacaaataggggttccgcgcacatttccccgaaaagtgccagatacctgaaacaaaacccatcgtacggccaaggaagtctccaataactgtgatccaccacaagcgccagggttttcccagtcacgacgttgtaaaacgacggccagtcatgcataatccgcacgcatctggaataaggaagtgccattccgcctgacct

SEQ ID NO: 411 - DNA, 3774 bp, synthetic construct
  source 1..3774: mol_type = other DNA
tcgagctcggtacccggggagccaggcggggctgggcggggcaaggccagcggtcggcggggaggcgggcgcgagggcggggagcggcgcggaagccgggccacataaaggagcgggcggcgcgacaggggcggctctttcctgggtggggtttgtgaagtcgtggcccgttagcaggaagcctaacagtcgccccgacgctagtgagggacccaatctgagtccccggccagccgaatccaagccgtgtgtactgcgtgctcagcactgcccgacagtcctagctaaacttcgccaactccgctgcctttgccgccaccatgggtgctggtgcaacggggagggctatggatggaccaaggctccttcttcttttgctcttgggcgttagtctgggtggagctaaagaggcatgccccaccggactttacacacattccggtgagtgttgcaaggcctgcaacctgggagaaggcgtcgctcaaccctgcggggcgaatcaaaccgtatgcgaaccttgcctcgattctgttacattctccgatgtcgtctctgcgacggaaccctgcaagccatgcacggaatgtgtcgggttgcaaagtatgtcagctccttgcgttgaagcagacgatgcggtgtgtagatgtgcctatgggtattatcaagacgaaacgacgggacggtgtgaagcatgtcgagtatgcgaggcgggcagtggcctcgtcttctcttgtcaggacaagcaaaacactgtctgtgaagaatgccctgatgggacttatagtgatgaggcgaatcacgtcgatccatgtcttccctgtactgtctgtgaagacactgagagacaattgcgagagtgtacgcgatgggccgacgcagagtgcgaggagatcccaggtcgatggataaccaggtcaacccctcctgagggatctgatagtaccgcgccctccacccaagaacccgaagctccacctgagcaagacctcatagcgtccacagtagcaggagttgtcacaaccgtcatgggaagttcacaaccagtagttaccaggggtaccacggataacctcattccggtgtactgcagcattctcgccgctgtggttgtcggacttgttgcatacattgccttcaaacgctggaatagccgcgccaagcgctcgggttcgggtgccaccaacttcagcctgctgaagcaggccggcgacgtggaggagaaccccggcccccccaagaccgtgacagccggacgtcggcgctgtcgaccccaatggctctggctgagcctcatagccctttgctgatggctgagggcttggccagccaccggcccgcctgggacgccgcgccctccgccatagccaagggtagggaggggaccggagtgggatcctggtctggtgcgccctcaggggttgagggggtgtccaggctggaagtttggacggggcgaggcctgcctctttctcaggttccagttccctgtgtctgagatgcaacagtcaggacggcttcgttggggcctggggtcctctagagtcgacctgcagaggctaggtggaggctcagtgatgataagtctgcgatggtggatgcatgtgtcatggtcatagctgtttcctgtgtgaaattgttatccgctcagagggcacaatcctattccgcgctatccgacaatctccaagacattaggtggagttcagttcggcgtatggcatatgtcgctggaaagaacatgtgagcaaaaggccagcaaaaggccaggaaccgtaaaaaggccgcgttgctggcgtttttccataggctccgcccccctgacgagcatcacaaaaatcgacgctcaagtcagaggtggcgaaacccgacaggactataaagataccaggcgtttccccctggaagctccctcgtgcgctctcctgttccgaccctgccgcttaccggatacctgtccgcctttctcccttcgggaagcgtggcgctttctcatagctcacgctgtaggtatctcagttcggtgtaggtcgttcgctccaagctgggctgtgtgcacgaaccccccgttcagcccgaccgctgcgccttatccggtaactatcgtcttgagtccaacccggtaagacacgacttatcgccactggcagcagccactggtaacaggattagcagagcgaggtatgtaggcggtgctacagagttcttgaagtggtggcctaactacggctacactagaagaacagtatttggtatctgcgctctgctgaagccagttaccttcggaaaaagagttggtagctcttgatccggcaaacaaaccaccgctggtagcggtggtttttttgtttgcaagcagcagattacgcgcagaaaaaaaggatctcaagaagatcctttgatcttttctacggggtctgacgctctattcaacaaagccgccgtcccgtcaagtcagcgtaaatgggtagggggcttcaaatcgtcctcgtgataccaattcggagcctgcttttttgtacaaacttgttgataatggcaattcaaggatcttcacctagatccttttaaattaaaaatgaagttttaaatcaatctaaagtatatatgagtaaacttggtctgacagttaccaatgcttaatcagtgaggcacctatctcagcgatctgtctatttcgttcatccatagttgcctgactccccgtcgtgtagataactacgatacgggagggcttaccatctggccccagtgctgcaatgataccgcgagagccacgctcaccggctccagatttatcagcaataaaccagccagccggaagggccgagcgcagaagtggtcctgcaactttatccgcctccatccagtctattaattgttgccgggaagctagagtaagtagttcgccagttaatagtttgcgcaacgttgttgccattgctacaggcatcgtggtgtcacgctcgtcgtttggtatggcttcattcagctccggttcccaacgatcaaggcgagttacatgatcccccatgttgtgcaaaaaagcggttagctccttcggtcctccgatcgttgtcagaagtaagttggccgcagtgttatcactcatggttatggcagcactgcataattctcttactgtcatgccatccgtaagatgcttttctgtgactggtgagtactcaaccaagtcattctgagaatagtgtatgcggcgaccgagttgctcttgcccggcgtcaatacgggataataccgcgccacatagcagaactttaaaagtgctcatcattggaaaacgttcttcggggcgaaaactctcaaggatcttaccgctgttgagatccagttcgatgtaacccactcgtgcacccaactgatcttcagcatcttttactttcaccagcgtttctgggtgagcaaaaacaggaaggcaaaatgccgcaaaaaagggaataagggcgacacggaaatgttgaatactcatactcttcctttttcaatattattgaagcatttatcagggttattgtctcatgagcggatacatatttgaatgtatttagaaaaataaacaaataggggttccgcgcacatttccccgaaaagtgccagatacctgaaacaaaacccatcgtacggccaaggaagtctccaataactgtgatccaccacaagcgccagggttttcccagtcacgacgttgtaaaacgacggccagtcatgcataatccgcacgcatctggaataaggaagtgccattccgcctgacct

SEQ ID NO: 412 - DNA, 3774 bp, synthetic construct
  source 1..3774: mol_type = other DNA
tcgagctcggtacccggggaacaataactatttccctcttgtcccctcaaaaccctaaaacaaaacctagcctatttaacatatatttaatcttccaatagggtttggcgttgttgtcagcctcggggagagagattggacaaatattctccaagaggaggagggcgacgccaaggactttccacatcaactgctttggggtatctccacaagttggaagagggaccctttcgttttgcattgcgtgtgttgtgctcattaccagtgcagcgactgccgtcccagggtgactctgagttgtcgtttatcgtcagctaaccatgggtgctggtgcaacggggagggctatggatggaccaaggctccttcttcttttgctcttgggcgttagtctgggtggagctaaagaggcatgccccaccggactttacacacattccggtgagtgttgcaaggcctgcaacctgggagaaggcgtcgctcaaccctgcggggcgaatcaaaccgtatgcgaaccttgcctcgattctgttacattctccgatgtcgtctctgcgacggaaccctgcaagccatgcacggaatgtgtcgggttgcaaagtatgtcagctccttgcgttgaagcagacgatgcggtgtgtagatgtgcctatgggtattatcaagacgaaacgacgggacggtgtgaagcatgtcgagtatgcgaggcgggcagtggcctcgtcttctcttgtcaggacaagcaaaacactgtctgtgaagaatgccctgatgggacttatagtgatgaggcgaatcacgtcgatccatgtcttccctgtactgtctgtgaagacactgagagacaattgcgagagtgtacgcgatgggccgacgcagagtgcgaggagatcccaggtcgatggataaccaggtcaacccctcctgagggatctgatagtaccgcgccctccacccaagaacccgaagctccacctgagcaagacctcatagcgtccacagtagcaggagttgtcacaaccgtcatgggaagttcacaaccagtagttaccaggggtaccacggataacctcattccggtgtactgcagcattctcgccgctgtggttgtcggacttgttgcatacattgccttcaaacgctggaatagccgcgccaagcgctcgggttcgggtgccaccaacttcagcctgctgaagcaggccggcgacgtggaggagaaccccggccccgctagcgaagacaatcgtgtcccttctccccctcctacaggtgatgacgggggaggtggagggagagaagaaacccctactgaagggggtgcattgtctctgaaaccagggctccccatcaggggcatcagaatgaaatttgccgtgttgaccggtttggttgaagttggagaagtatccaatagggatattgtagaaactgtctttaacctggtaagtccatgaatattttataagcatatactcttttcagtgggttggggaacaagatcttaaagctggagccatgtggtttactcatcctctagagtcgacctgcagaggctaggtggaggctcagtgatgataagtctgcgatggtggatgcatgtgtcatggtcatagctgtttcctgtgtgaaattgttatccgctcagagggcacaatcctattccgcgctatccgacaatctccaagacattaggtggagttcagttcggcgtatggcatatgtcgctggaaagaacatgtgagcaaaaggccagcaaaaggccaggaaccgtaaaaaggccgcgttgctggcgtttttccataggctccgcccccctgacgagcatcacaaaaatcgacgctcaagtcagaggtggcgaaacccgacaggactataaagataccaggcgtttccccctggaagctccctcgtgcgctctcctgttccgaccctgccgcttaccggatacctgtccgcctttctcccttcgggaagcgtggcgctttctcatagctcacgctgtaggtatctcagttcggtgtaggtcgttcgctccaagctgggctgtgtgcacgaaccccccgttcagcccgaccgctgcgccttatccggtaactatcgtcttgagtccaacccggtaagacacgacttatcgccactggcagcagccactggtaacaggattagcagagcgaggtatgtaggcggtgctacagagttcttgaagtggtggcctaactacggctacactagaagaacagtatttggtatctgcgctctgctgaagccagttaccttcggaaaaagagttggtagctcttgatccggcaaacaaaccaccgctggtagcggtggtttttttgtttgcaagcagcagattacgcgcagaaaaaaaggatctcaagaagatcctttgatcttttctacggggtctgacgctctattcaacaaagccgccgtcccgtcaagtcagcgtaaatgggtagggggcttcaaatcgtcctcgtgataccaattcggagcctgcttttttgtacaaacttgttgataatggcaattcaaggatcttcacctagatccttttaaattaaaaatgaagttttaaatcaatctaaagtatatatgagtaaacttggtctgacagttaccaatgcttaatcagtgaggcacctatctcagcgatctgtctatttcgttcatccatagttgcctgactccccgtcgtgtagataactacgatacgggagggcttaccatctggccccagtgctgcaatgataccgcgagagccacgctcaccggctccagatttatcagcaataaaccagccagccggaagggccgagcgcagaagtggtcctgcaactttatccgcctccatccagtctattaattgttgccgggaagctagagtaagtagttcgccagttaatagtttgcgcaacgttgttgccattgctacaggcatcgtggtgtcacgctcgtcgtttggtatggcttcattcagctccggttcccaacgatcaaggcgagttacatgatcccccatgttgtgcaaaaaagcggttagctccttcggtcctccgatcgttgtcagaagtaagttggccgcagtgttatcactcatggttatggcagcactgcataattctcttactgtcatgccatccgtaagatgcttttctgtgactggtgagtactcaaccaagtcattctgagaatagtgtatgcggcgaccgagttgctcttgcccggcgtcaatacgggataataccgcgccacatagcagaactttaaaagtgctcatcattggaaaacgttcttcggggcgaaaactctcaaggatcttaccgctgttgagatccagttcgatgtaacccactcgtgcacccaactgatcttcagcatcttttactttcaccagcgtttctgggtgagcaaaaacaggaaggcaaaatgccgcaaaaaagggaataagggcgacacggaaatgttgaatactcatactcttcctttttcaatattattgaagcatttatcagggttattgtctcatgagcggatacatatttgaatgtatttagaaaaataaacaaataggggttccgcgcacatttccccgaaaagtgccagatacctgaaacaaaacccatcgtacggccaaggaagtctccaataactgtgatccaccacaagcgccagggttttcccagtcacgacgttgtaaaacgacggccagtcatgcataatccgcacgcatctggaataaggaagtgccattccgcctgacct

SEQ ID NO: 413 - DNA, 3774 bp, synthetic construct
  source 1..3774: mol_type = other DNA
tcgagctcggtacccggggagggcagagcgcgccgtctgccccagtatcgggaggccagttccgcgctgggcccacgccctcctcgcccgccgctgcctgcgcgccaggccgggtggcggagccggccgtcgctgctccgagctcggaccctcccccggggtgatttcggcttagaaggtggaaatgcggaagtttccagcgccgaccgacagacgaggtttgcgcttggctgggcatgttccgcggctactctgcggcgcgccaggcccccgctttccgcaccccgcgacgctagaagccaccgaaccgcgggccggccatgggtgctggtgcaacggggagggctatggatggaccaaggctccttcttcttttgctcttgggcgttagtctgggtggagctaaagaggcatgccccaccggactttacacacattccggtgagtgttgcaaggcctgcaacctgggagaaggcgtcgctcaaccctgcggggcgaatcaaaccgtatgcgaaccttgcctcgattctgttacattctccgatgtcgtctctgcgacggaaccctgcaagccatgcacggaatgtgtcgggttgcaaagtatgtcagctccttgcgttgaagcagacgatgcggtgtgtagatgtgcctatgggtattatcaagacgaaacgacgggacggtgtgaagcatgtcgagtatgcgaggcgggcagtggcctcgtcttctcttgtcaggacaagcaaaacactgtctgtgaagaatgccctgatgggacttatagtgatgaggcgaatcacgtcgatccatgtcttccctgtactgtctgtgaagacactgagagacaattgcgagagtgtacgcgatgggccgacgcagagtgcgaggagatcccaggtcgatggataaccaggtcaacccctcctgagggatctgatagtaccgcgccctccacccaagaacccgaagctccacctgagcaagacctcatagcgtccacagtagcaggagttgtcacaaccgtcatgggaagttcacaaccagtagttaccaggggtaccacggataacctcattccggtgtactgcagcattctcgccgctgtggttgtcggacttgttgcatacattgccttcaaacgctggaatagccgcgccaagcgctcgggttcgggtgccaccaacttcagcctgctgaagcaggccggcgacgtggaggagaaccccggccccgcgactctgccgagcgcagagcgccgcgcgttcgcgctcaagatcaacaggtaagacgccccccgcggcgcgcaggttgcggccggacagcccagcgctggtgtgaagcggagcttcgctgcaggggccgaggccggacgagtccattcgcgtccgcggcggggcgcgcctgagacctggggcgcccggttcccgaggctgcggcggtggagccgctggacgcgcggcggctcctgcgctgggcccggcgaggtcctccccaagaatctcggtgctcctggatgtcctcagccgccggggtcctctagagtcgacctgcagaggctaggtggaggctcagtgatgataagtctgcgatggtggatgcatgtgtcatggtcatagctgtttcctgtgtgaaattgttatccgctcagagggcacaatcctattccgcgctatccgacaatctccaagacattaggtggagttcagttcggcgtatggcatatgtcgctggaaagaacatgtgagcaaaaggccagcaaaaggccaggaaccgtaaaaaggccgcgttgctggcgtttttccataggctccgcccccctgacgagcatcacaaaaatcgacgctcaagtcagaggtggcgaaacccgacaggactataaagataccaggcgtttccccctggaagctccctcgtgcgctctcctgttccgaccctgccgcttaccggatacctgtccgcctttctcccttcgggaagcgtggcgctttctcatagctcacgctgtaggtatctcagttcggtgtaggtcgttcgctccaagctgggctgtgtgcacgaaccccccgttcagcccgaccgctgcgccttatccggtaactatcgtcttgagtccaacccggtaagacacgacttatcgccactggcagcagccactggtaacaggattagcagagcgaggtatgtaggcggtgctacagagttcttgaagtggtggcctaactacggctacactagaagaacagtatttggtatctgcgctctgctgaagccagttaccttcggaaaaagagttggtagctcttgatccggcaaacaaaccaccgctggtagcggtggtttttttgtttgcaagcagcagattacgcgcagaaaaaaaggatctcaagaagatcctttgatcttttctacggggtctgacgctctattcaacaaagccgccgtcccgtcaagtcagcgtaaatgggtagggggcttcaaatcgtcctcgtgataccaattcggagcctgcttttttgtacaaacttgttgataatggcaattcaaggatcttcacctagatccttttaaattaaaaatgaagttttaaatcaatctaaagtatatatgagtaaacttggtctgacagttaccaatgcttaatcagtgaggcacctatctcagcgatctgtctatttcgttcatccatagttgcctgactccccgtcgtgtagataactacgatacgggagggcttaccatctggccccagtgctgcaatgataccgcgagagccacgctcaccggctccagatttatcagcaataaaccagccagccggaagggccgagcgcagaagtggtcctgcaactttatccgcctccatccagtctattaattgttgccgggaagctagagtaagtagttcgccagttaatagtttgcgcaacgttgttgccattgctacaggcatcgtggtgtcacgctcgtcgtttggtatggcttcattcagctccggttcccaacgatcaaggcgagttacatgatcccccatgttgtgcaaaaaagcggttagctccttcggtcctccgatcgttgtcagaagtaagttggccgcagtgttatcactcatggttatggcagcactgcataattctcttactgtcatgccatccgtaagatgcttttctgtgactggtgagtactcaaccaagtcattctgagaatagtgtatgcggcgaccgagttgctcttgcccggcgtcaatacgggataataccgcgccacatagcagaactttaaaagtgctcatcattggaaaacgttcttcggggcgaaaactctcaaggatcttaccgctgttgagatccagttcgatgtaacccactcgtgcacccaactgatcttcagcatcttttactttcaccagcgtttctgggtgagcaaaaacaggaaggcaaaatgccgcaaaaaagggaataagggcgacacggaaatgttgaatactcatactcttcctttttcaatattattgaagcatttatcagggttattgtctcatgagcggatacatatttgaatgtatttagaaaaataaacaaataggggttccgcgcacatttccccgaaaagtgccagatacctgaaacaaaacccatcgtacggccaaggaagtctccaataactgtgatccaccacaagcgccagggttttcccagtcacgacgttgtaaaacgacggccagtcatgcataatccgcacgcatctggaataaggaagtgccattccgcctgacct

SEQ ID NO: 414 - DNA, 3774 bp, synthetic construct
  source 1..3774: mol_type = other DNA
tcgagctcggtacccggggatttaaaaaaaggagcattaaaacaatggtcaaatgagagaaaaagcaaaattcagacagacagatacatacacacaccccaaaccctcaaacctccagggcttcctgcctgtgaaccgaaagggggagtgcgaatttcttggccctgtcggcaggtgctttctcaaaggccccacagtcctccacttcctggggaggtagctgcagaataaaaccagcagagactccttttctcctaaccgtcccggccaccgctgcctcagcctctgcgtcccagcgtctttctgagcgaaaggacaagatgggtgctggtgcaacggggagggctatggatggaccaaggctccttcttcttttgctcttgggcgttagtctgggtggagctaaagaggcatgccccaccggactttacacacattccggtgagtgttgcaaggcctgcaacctgggagaaggcgtcgctcaaccctgcggggcgaatcaaaccgtatgcgaaccttgcctcgattctgttacattctccgatgtcgtctctgcgacggaaccctgcaagccatgcacggaatgtgtcgggttgcaaagtatgtcagctccttgcgttgaagcagacgatgcggtgtgtagatgtgcctatgggtattatcaagacgaaacgacgggacggtgtgaagcatgtcgagtatgcgaggcgggcagtggcctcgtcttctcttgtcaggacaagcaaaacactgtctgtgaagaatgccctgatgggacttatagtgatgaggcgaatcacgtcgatccatgtcttccctgtactgtctgtgaagacactgagagacaattgcgagagtgtacgcgatgggccgacgcagagtgcgaggagatcccaggtcgatggataaccaggtcaacccctcctgagggatctgatagtaccgcgccctccacccaagaacccgaagctccacctgagcaagacctcatagcgtccacagtagcaggagttgtcacaaccgtcatgggaagttcacaaccagtagttaccaggggtaccacggataacctcattccggtgtactgcagcattctcgccgctgtggttgtcggacttgttgcatacattgccttcaaacgctggaatagccgcgccaagcgctcgggttcgggtgccaccaacttcagcctgctgaagcaggccggcgacgtggaggagaaccccggccccaagtggaaggcgcttttcaccgcggccatcctgcaggcacagttgccgattacaggtagggccgacgtgtcgacggcagggaacttctagaaactctttgtgtatgtgtaggggagtgggtgtgggtagtggagggtggtgaggggctggggtctccttcaaatcctgccctcctcaaatcaatgggcaagtgagcagtgaggggtccggcccggtgctggcatctgctccgtcacagccgagttgggcatcagttcagagccagctgctagaatacacagctcctccaggtacagattttcctctagagtcgacctgcagaggctaggtggaggctcagtgatgataagtctgcgatggtggatgcatgtgtcatggtcatagctgtttcctgtgtgaaattgttatccgctcagagggcacaatcctattccgcgctatccgacaatctccaagacattaggtggagttcagttcggcgtatggcatatgtcgctggaaagaacatgtgagcaaaaggccagcaaaaggccaggaaccgtaaaaaggccgcgttgctggcgtttttccataggctccgcccccctgacgagcatcacaaaaatcgacgctcaagtcagaggtggcgaaacccgacaggactataaagataccaggcgtttccccctggaagctccctcgtgcgctctcctgttccgaccctgccgcttaccggatacctgtccgcctttctcccttcgggaagcgtggcgctttctcatagctcacgctgtaggtatctcagttcggtgtaggtcgttcgctccaagctgggctgtgtgcacgaaccccccgttcagcccgaccgctgcgccttatccggtaactatcgtcttgagtccaacccggtaagacacgacttatcgccactggcagcagccactggtaacaggattagcagagcgaggtatgtaggcggtgctacagagttcttgaagtggtggcctaactacggctacactagaagaacagtatttggtatctgcgctctgctgaagccagttaccttcggaaaaagagttggtagctcttgatccggcaaacaaaccaccgctggtagcggtggtttttttgtttgcaagcagcagattacgcgcagaaaaaaaggatctcaagaagatcctttgatcttttctacggggtctgacgctctattcaacaaagccgccgtcccgtcaagtcagcgtaaatgggtagggggcttcaaatcgtcctcgtgataccaattcggagcctgcttttttgtacaaacttgttgataatggcaattcaaggatcttcacctagatccttttaaattaaaaatgaagttttaaatcaatctaaagtatatatgagtaaacttggtctgacagttaccaatgcttaatcagtgaggcacctatctcagcgatctgtctatttcgttcatccatagttgcctgactccccgtcgtgtagataactacgatacgggagggcttaccatctggccccagtgctgcaatgataccgcgagagccacgctcaccggctccagatttatcagcaataaaccagccagccggaagggccgagcgcagaagtggtcctgcaactttatccgcctccatccagtctattaattgttgccgggaagctagagtaagtagttcgccagttaatagtttgcgcaacgttgttgccattgctacaggcatcgtggtgtcacgctcgtcgtttggtatggcttcattcagctccggttcccaacgatcaaggcgagttacatgatcccccatgttgtgcaaaaaagcggttagctccttcggtcctccgatcgttgtcagaagtaagttggccgcagtgttatcactcatggttatggcagcactgcataattctcttactgtcatgccatccgtaagatgcttttctgtgactggtgagtactcaaccaagtcattctgagaatagtgtatgcggcgaccgagttgctcttgcccggcgtcaatacgggataataccgcgccacatagcagaactttaaaagtgctcatcattggaaaacgttcttcggggcgaaaactctcaaggatcttaccgctgttgagatccagttcgatgtaacccactcgtgcacccaactgatcttcagcatcttttactttcaccagcgtttctgggtgagcaaaaacaggaaggcaaaatgccgcaaaaaagggaataagggcgacacggaaatgttgaatactcatactcttcctttttcaatattattgaagcatttatcagggttattgtctcatgagcggatacatatttgaatgtatttagaaaaataaacaaataggggttccgcgcacatttccccgaaaagtgccagatacctgaaacaaaacccatcgtacggccaaggaagtctccaataactgtgatccaccacaagcgccagggttttcccagtcacgacgttgtaaaacgacggccagtcatgcataatccgcacgcatctggaataaggaagtgccattccgcctgacct

SEQ ID NO: 415 - DNA, 3774 bp, synthetic construct
  source 1..3774: mol_type = other DNA
tcgagctcggtacccggggaggctttagtttgcacgtccatgaattgtctgccacatccctcttctgaatggttggaaattgggcatctgttcctttaaacaggaaacatttcttgttcgagtgagtcatctctgttctgctttaggagtaaagtttaccctgcagttccttctgtggtgaagttttctctttctctcggagaccagattctgcctttctgctggagggaagtgttttcacaggttctcctccttttatcttttgtgttttttttcaagccctgctgaatttgctagtcaactcaacaggaagtgacgccatgggtgctggtgcaacggggagggctatggatggaccaaggctccttcttcttttgctcttgggcgttagtctgggtggagctaaagaggcatgccccaccggactttacacacattccggtgagtgttgcaaggcctgcaacctgggagaaggcgtcgctcaaccctgcggggcgaatcaaaccgtatgcgaaccttgcctcgattctgttacattctccgatgtcgtctctgcgacggaaccctgcaagccatgcacggaatgtgtcgggttgcaaagtatgtcagctccttgcgttgaagcagacgatgcggtgtgtagatgtgcctatgggtattatcaagacgaaacgacgggacggtgtgaagcatgtcgagtatgcgaggcgggcagtggcctcgtcttctcttgtcaggacaagcaaaacactgtctgtgaagaatgccctgatgggacttatagtgatgaggcgaatcacgtcgatccatgtcttccctgtactgtctgtgaagacactgagagacaattgcgagagtgtacgcgatgggccgacgcagagtgcgaggagatcccaggtcgatggataaccaggtcaacccctcctgagggatctgatagtaccgcgccctccacccaagaacccgaagctccacctgagcaagacctcatagcgtccacagtagcaggagttgtcacaaccgtcatgggaagttcacaaccagtagttaccaggggtaccacggataacctcattccggtgtactgcagcattctcgccgctgtggttgtcggacttgttgcatacattgccttcaaacgctggaatagccgcgccaagcgctcgggttcgggtgccaccaacttcagcctgctgaagcaggccggcgacgtggaggagaaccccggccccgagggaggcagaagagcgagagtggttattgaaagtaaaagaaacttcttcctgggagcctttcccacccccttccctgctgagcacgtggagttaggcaggttaggggactcggagactgcgatggtgccaggaaagggtggagcgggtgagtgcctgttgccaaggtggcctcttcaacaggaaaccacaatatttttgtttcttgacttgctctagaaacagggctgtgggggtggggaagcaacttggatctgcccttctgaggacacctctgggtgctgcctggcccaggtctcctcctctagagtcgacctgcagaggctaggtggaggctcagtgatgataagtctgcgatggtggatgcatgtgtcatggtcatagctgtttcctgtgtgaaattgttatccgctcagagggcacaatcctattccgcgctatccgacaatctccaagacattaggtggagttcagttcggcgtatggcatatgtcgctggaaagaacatgtgagcaaaaggccagcaaaaggccaggaaccgtaaaaaggccgcgttgctggcgtttttccataggctccgcccccctgacgagcatcacaaaaatcgacgctcaagtcagaggtggcgaaacccgacaggactataaagataccaggcgtttccccctggaagctccctcgtgcgctctcctgttccgaccctgccgcttaccggatacctgtccgcctttctcccttcgggaagcgtggcgctttctcatagctcacgctgtaggtatctcagttcggtgtaggtcgttcgctccaagctgggctgtgtgcacgaaccccccgttcagcccgaccgctgcgccttatccggtaactatcgtcttgagtccaacccggtaagacacgacttatcgccactggcagcagccactggtaacaggattagcagagcgaggtatgtaggcggtgctacagagttcttgaagtggtggcctaactacggctacactagaagaacagtatttggtatctgcgctctgctgaagccagttaccttcggaaaaagagttggtagctcttgatccggcaaacaaaccaccgctggtagcggtggtttttttgtttgcaagcagcagattacgcgcagaaaaaaaggatctcaagaagatcctttgatcttttctacggggtctgacgctctattcaacaaagccgccgtcccgtcaagtcagcgtaaatgggtagggggcttcaaatcgtcctcgtgataccaattcggagcctgcttttttgtacaaacttgttgataatggcaattcaaggatcttcacctagatccttttaaattaaaaatgaagttttaaatcaatctaaagtatatatgagtaaacttggtctgacagttaccaatgcttaatcagtgaggcacctatctcagcgatctgtctatttcgttcatccatagttgcctgactccccgtcgtgtagataactacgatacgggagggcttaccatctggccccagtgctgcaatgataccgcgagagccacgctcaccggctccagatttatcagcaataaaccagccagccggaagggccgagcgcagaagtggtcctgcaactttatccgcctccatccagtctattaattgttgccgggaagctagagtaagtagttcgccagttaatagtttgcgcaacgttgttgccattgctacaggcatcgtggtgtcacgctcgtcgtttggtatggcttcattcagctccggttcccaacgatcaaggcgagttacatgatcccccatgttgtgcaaaaaagcggttagctccttcggtcctccgatcgttgtcagaagtaagttggccgcagtgttatcactcatggttatggcagcactgcataattctcttactgtcatgccatccgtaagatgcttttctgtgactggtgagtactcaaccaagtcattctgagaatagtgtatgcggcgaccgagttgctcttgcccggcgtcaatacgggataataccgcgccacatagcagaactttaaaagtgctcatcattggaaaacgttcttcggggcgaaaactctcaaggatcttaccgctgttgagatccagttcgatgtaacccactcgtgcacccaactgatcttcagcatcttttactttcaccagcgtttctgggtgagcaaaaacaggaaggcaaaatgccgcaaaaaagggaataagggcgacacggaaatgttgaatactcatactcttcctttttcaatattattgaagcatttatcagggttattgtctcatgagcggatacatatttgaatgtatttagaaaaataaacaaataggggttccgcgcacatttccccgaaaagtgccagatacctgaaacaaaacccatcgtacggccaaggaagtctccaataactgtgatccaccacaagcgccagggttttcccagtcacgacgttgtaaaacgacggccagtcatgcataatccgcacgcatctggaataaggaagtgccattccgcctgacct

SEQ ID NO: 416 - DNA, 3774 bp, synthetic construct
  source 1..3774: mol_type = other DNA
tcgagctcggtacccggggaaatgtggttgcattgtcaatagggacgctaaagttcaggccaccttttccatattctctgccagctccctgctcagagatagagcaatttacaccgcttccttcctaccctacccctagcccacccccactctgaaaatttcccaccatcaacggcagaaagcagagaagcagacatcttctagttcctcccccactctcctctttccggtacctgtgagtcagctaggggagggcagctctcacccaggctgatagttcggtgacctggctttatctactggatgagtaccggtcgaagatgggtgctggtgcaacggggagggctatggatggaccaaggctccttcttcttttgctcttgggcgttagtctgggtggagctaaagaggcatgccccaccggactttacacacattccggtgagtgttgcaaggcctgcaacctgggagaaggcgtcgctcaaccctgcggggcgaatcaaaccgtatgcgaaccttgcctcgattctgttacattctccgatgtcgtctctgcgacggaaccctgcaagccatgcacggaatgtgtcgggttgcaaagtatgtcagctccttgcgttgaagcagacgatgcggtgtgtagatgtgcctatgggtattatcaagacgaaacgacgggacggtgtgaagcatgtcgagtatgcgaggcgggcagtggcctcgtcttctcttgtcaggacaagcaaaacactgtctgtgaagaatgccctgatgggacttatagtgatgaggcgaatcacgtcgatccatgtcttccctgtactgtctgtgaagacactgagagacaattgcgagagtgtacgcgatgggccgacgcagagtgcgaggagatcccaggtcgatggataaccaggtcaacccctcctgagggatctgatagtaccgcgccctccacccaagaacccgaagctccacctgagcaagacctcatagcgtccacagtagcaggagttgtcacaaccgtcatgggaagttcacaaccagtagttaccaggggtaccacggataacctcattccggtgtactgcagcattctcgccgctgtggttgtcggacttgttgcatacattgccttcaaacgctggaatagccgcgccaagcgctcgggttcgggtgccaccaacttcagcctgctgaagcaggccggcgacgtggaggagaaccccggccccgaacatagtaccttcctatctggcctcgtactggctacccttctctcgcaaggtaaggctactccaggtgggtgggggaagggacctgagagggacattactgatgggagtgaggcccacttgaaagtgtttcttgccaggcacggtggctcacaccagtaatcccagagctttgggaggccgaagtgggaggatcctttgaggccaggagtttgagaccagtctgagcaacatgatgagactctatctttacaaaaaacaaaagaattagccaggcatggtggtgcacaactgtagtcctcctctagagtcgacctgcagaggctaggtggaggctcagtgatgataagtctgcgatggtggatgcatgtgtcatggtcatagctgtttcctgtgtgaaattgttatccgctcagagggcacaatcctattccgcgctatccgacaatctccaagacattaggtggagttcagttcggcgtatggcatatgtcgctggaaagaacatgtgagcaaaaggccagcaaaaggccaggaaccgtaaaaaggccgcgttgctggcgtttttccataggctccgcccccctgacgagcatcacaaaaatcgacgctcaagtcagaggtggcgaaacccgacaggactataaagataccaggcgtttccccctggaagctccctcgtgcgctctcctgttccgaccctgccgcttaccggatacctgtccgcctttctcccttcgggaagcgtggcgctttctcatagctcacgctgtaggtatctcagttcggtgtaggtcgttcgctccaagctgggctgtgtgcacgaaccccccgttcagcccgaccgctgcgccttatccggtaactatcgtcttgagtccaacccggtaagacacgacttatcgccactggcagcagccactggtaacaggattagcagagcgaggtatgtaggcggtgctacagagttcttgaagtggtggcctaactacggctacactagaagaacagtatttggtatctgcgctctgctgaagccagttaccttcggaaaaagagttggtagctcttgatccggcaaacaaaccaccgctggtagcggtggtttttttgtttgcaagcagcagattacgcgcagaaaaaaaggatctcaagaagatcctttgatcttttctacggggtctgacgctctattcaacaaagccgccgtcccgtcaagtcagcgtaaatgggtagggggcttcaaatcgtcctcgtgataccaattcggagcctgcttttttgtacaaacttgttgataatggcaattcaaggatcttcacctagatccttttaaattaaaaatgaagttttaaatcaatctaaagtatatatgagtaaacttggtctgacagttaccaatgcttaatcagtgaggcacctatctcagcgatctgtctatttcgttcatccatagttgcctgactccccgtcgtgtagataactacgatacgggagggcttaccatctggccccagtgctgcaatgataccgcgagagccacgctcaccggctccagatttatcagcaataaaccagccagccggaagggccgagcgcagaagtggtcctgcaactttatccgcctccatccagtctattaattgttgccgggaagctagagtaagtagttcgccagttaatagtttgcgcaacgttgttgccattgctacaggcatcgtggtgtcacgctcgtcgtttggtatggcttcattcagctccggttcccaacgatcaaggcgagttacatgatcccccatgttgtgcaaaaaagcggttagctccttcggtcctccgatcgttgtcagaagtaagttggccgcagtgttatcactcatggttatggcagcactgcataattctcttactgtcatgccatccgtaagatgcttttctgtgactggtgagtactcaaccaagtcattctgagaatagtgtatgcggcgaccgagttgctcttgcccggcgtcaatacgggataataccgcgccacatagcagaactttaaaagtgctcatcattggaaaacgttcttcggggcgaaaactctcaaggatcttaccgctgttgagatccagttcgatgtaacccactcgtgcacccaactgatcttcagcatcttttactttcaccagcgtttctgggtgagcaaaaacaggaaggcaaaatgccgcaaaaaagggaataagggcgacacggaaatgttgaatactcatactcttcctttttcaatattattgaagcatttatcagggttattgtctcatgagcggatacatatttgaatgtatttagaaaaataaacaaataggggttccgcgcacatttccccgaaaagtgccagatacctgaaacaaaacccatcgtacggccaaggaagtctccaataactgtgatccaccacaagcgccagggttttcccagtcacgacgttgtaaaacgacggccagtcatgcataatccgcacgcatctggaataaggaagtgccattccgcctgacct

SEQ ID NO: 417 - DNA, 3774 bp, synthetic construct
  source 1..3774: mol_type = other DNA
tcgagctcggtacccggggacgcgcctcgccgtggggcggtgcctgcgcctgagcctctacgagagggaaggaacgctgctccgagctccgcgtcgcgtcgcgtagattcgcgtcgccgtcgacctcagaggcggggccggaagcgctacggtttgacccccgagtccctctgttcccgaaggggcggccgtctttctcccgacccgctccgcctcctctccttcttccccattacccggaggccgaagcccccagccagggcggggcggcgcagcccgagctcccggacccggaagaagcgccatctcccgcctccaccatgggtgctggtgcaacggggagggctatggatggaccaaggctccttcttcttttgctcttgggcgttagtctgggtggagctaaagaggcatgccccaccggactttacacacattccggtgagtgttgcaaggcctgcaacctgggagaaggcgtcgctcaaccctgcggggcgaatcaaaccgtatgcgaaccttgcctcgattctgttacattctccgatgtcgtctctgcgacggaaccctgcaagccatgcacggaatgtgtcgggttgcaaagtatgtcagctccttgcgttgaagcagacgatgcggtgtgtagatgtgcctatgggtattatcaagacgaaacgacgggacggtgtgaagcatgtcgagtatgcgaggcgggcagtggcctcgtcttctcttgtcaggacaagcaaaacactgtctgtgaagaatgccctgatgggacttatagtgatgaggcgaatcacgtcgatccatgtcttccctgtactgtctgtgaagacactgagagacaattgcgagagtgtacgcgatgggccgacgcagagtgcgaggagatcccaggtcgatggataaccaggtcaacccctcctgagggatctgatagtaccgcgccctccacccaagaacccgaagctccacctgagcaagacctcatagcgtccacagtagcaggagttgtcacaaccgtcatgggaagttcacaaccagtagttaccaggggtaccacggataacctcattccggtgtactgcagcattctcgccgctgtggttgtcggacttgttgcatacattgccttcaaacgctggaatagccgcgccaagcgctcgggttcgggtgccaccaacttcagcctgctgaagcaggccggcgacgtggaggagaaccccggccccgagccgaccgcaccgagtctgacggaggaggacctcactgaagtgaagaaggacgtgagtaacgcagctgtgcccagggcgggcgggggcgggctgcagcccagcgggagacgaaagcggaagcctggagtccgaggacaaggaggatcctccaggtcggaggagcggaaagtcctagcacaggaggactgtggcgagccctgcatccgagggaccttggtggcagtgatcctccagtgatctgtcaatccaggttttacatcgctaaacgcagagcttgggctttgttgccaagtggtgtcctctagagtcgacctgcagaggctaggtggaggctcagtgatgataagtctgcgatggtggatgcatgtgtcatggtcatagctgtttcctgtgtgaaattgttatccgctcagagggcacaatcctattccgcgctatccgacaatctccaagacattaggtggagttcagttcggcgtatggcatatgtcgctggaaagaacatgtgagcaaaaggccagcaaaaggccaggaaccgtaaaaaggccgcgttgctggcgtttttccataggctccgcccccctgacgagcatcacaaaaatcgacgctcaagtcagaggtggcgaaacccgacaggactataaagataccaggcgtttccccctggaagctccctcgtgcgctctcctgttccgaccctgccgcttaccggatacctgtccgcctttctcccttcgggaagcgtggcgctttctcatagctcacgctgtaggtatctcagttcggtgtaggtcgttcgctccaagctgggctgtgtgcacgaaccccccgttcagcccgaccgctgcgccttatccggtaactatcgtcttgagtccaacccggtaagacacgacttatcgccactggcagcagccactggtaacaggattagcagagcgaggtatgtaggcggtgctacagagttcttgaagtggtggcctaactacggctacactagaagaacagtatttggtatctgcgctctgctgaagccagttaccttcggaaaaagagttggtagctcttgatccggcaaacaaaccaccgctggtagcggtggtttttttgtttgcaagcagcagattacgcgcagaaaaaaaggatctcaagaagatcctttgatcttttctacggggtctgacgctctattcaacaaagccgccgtcccgtcaagtcagcgtaaatgggtagggggcttcaaatcgtcctcgtgataccaattcggagcctgcttttttgtacaaacttgttgataatggcaattcaaggatcttcacctagatccttttaaattaaaaatgaagttttaaatcaatctaaagtatatatgagtaaacttggtctgacagttaccaatgcttaatcagtgaggcacctatctcagcgatctgtctatttcgttcatccatagttgcctgactccccgtcgtgtagataactacgatacgggagggcttaccatctggccccagtgctgcaatgataccgcgagagccacgctcaccggctccagatttatcagcaataaaccagccagccggaagggccgagcgcagaagtggtcctgcaactttatccgcctccatccagtctattaattgttgccgggaagctagagtaagtagttcgccagttaatagtttgcgcaacgttgttgccattgctacaggcatcgtggtgtcacgctcgtcgtttggtatggcttcattcagctccggttcccaacgatcaaggcgagttacatgatcccccatgttgtgcaaaaaagcggttagctccttcggtcctccgatcgttgtcagaagtaagttggccgcagtgttatcactcatggttatggcagcactgcataattctcttactgtcatgccatccgtaagatgcttttctgtgactggtgagtactcaaccaagtcattctgagaatagtgtatgcggcgaccgagttgctcttgcccggcgtcaatacgggataataccgcgccacatagcagaactttaaaagtgctcatcattggaaaacgttcttcggggcgaaaactctcaaggatcttaccgctgttgagatccagttcgatgtaacccactcgtgcacccaactgatcttcagcatcttttactttcaccagcgtttctgggtgagcaaaaacaggaaggcaaaatgccgcaaaaaagggaataagggcgacacggaaatgttgaatactcatactcttcctttttcaatattattgaagcatttatcagggttattgtctcatgagcggatacatatttgaatgtatttagaaaaataaacaaataggggttccgcgcacatttccccgaaaagtgccagatacctgaaacaaaacccatcgtacggccaaggaagtctccaataactgtgatccaccacaagcgccagggttttcccagtcacgacgttgtaaaacgacggccagtcatgcataatccgcacgcatctggaataaggaagtgccattccgcctgacct

SEQ ID NO: 418 - DNA, 3774 bp, synthetic construct
  source 1..3774: mol_type = other DNA
tcgagctcggtacccggggatgttggcttatgcctgtaatctcagcactttgggaggccaaggtgggaggatcacttgagtccaggagttcaaggccaccctgggcaacaggcaaaaaatagagaccccatctctattttttaaaaataaaataaactgggagaaagaagcagggtcctccccagagcatctttatccctagtcacagacctgacacctgtgttgggcaatggctacttctagattgtttacccctactgggacttgtggtgaacatatgcacactttggtttacagttcggacccgtgaatttggcacgatgggtgctggtgcaacggggagggctatggatggaccaaggctccttcttcttttgctcttgggcgttagtctgggtggagctaaagaggcatgccccaccggactttacacacattccggtgagtgttgcaaggcctgcaacctgggagaaggcgtcgctcaaccctgcggggcgaatcaaaccgtatgcgaaccttgcctcgattctgttacattctccgatgtcgtctctgcgacggaaccctgcaagccatgcacggaatgtgtcgggttgcaaagtatgtcagctccttgcgttgaagcagacgatgcggtgtgtagatgtgcctatgggtattatcaagacgaaacgacgggacggtgtgaagcatgtcgagtatgcgaggcgggcagtggcctcgtcttctcttgtcaggacaagcaaaacactgtctgtgaagaatgccctgatgggacttatagtgatgaggcgaatcacgtcgatccatgtcttccctgtactgtctgtgaagacactgagagacaattgcgagagtgtacgcgatgggccgacgcagagtgcgaggagatcccaggtcgatggataaccaggtcaacccctcctgagggatctgatagtaccgcgccctccacccaagaacccgaagctccacctgagcaagacctcatagcgtccacagtagcaggagttgtcacaaccgtcatgggaagttcacaaccagtagttaccaggggtaccacggataacctcattccggtgtactgcagcattctcgccgctgtggttgtcggacttgttgcatacattgccttcaaacgctggaatagccgcgccaagcgctcgggttcgggtgccaccaacttcagcctgctgaagcaggccggcgacgtggaggagaaccccggccccgctcaatggaatcagctacagcagcttgacacacggtacctggagcagctccatcagctctacagtgacagcttcccaatggagctgcggcagtttctggccccttggattgagagtcaagattggtaagtccttcttaagtgactctccaaattgttaggtttcagtttgagtcaagagacatgaactcttaatgtcatgccttgctgttccattaaaaaatgtatgggtacaggtgatggggaaaatgagatcaggagataaaggggcaccctttggtcttgtaaagccttttttatctcctctagagtcgacctgcagaggctaggtggaggctcagtgatgataagtctgcgatggtggatgcatgtgtcatggtcatagctgtttcctgtgtgaaattgttatccgctcagagggcacaatcctattccgcgctatccgacaatctccaagacattaggtggagttcagttcggcgtatggcatatgtcgctggaaagaacatgtgagcaaaaggccagcaaaaggccaggaaccgtaaaaaggccgcgttgctggcgtttttccataggctccgcccccctgacgagcatcacaaaaatcgacgctcaagtcagaggtggcgaaacccgacaggactataaagataccaggcgtttccccctggaagctccctcgtgcgctctcctgttccgaccctgccgcttaccggatacctgtccgcctttctcccttcgggaagcgtggcgctttctcatagctcacgctgtaggtatctcagttcggtgtaggtcgttcgctccaagctgggctgtgtgcacgaaccccccgttcagcccgaccgctgcgccttatccggtaactatcgtcttgagtccaacccggtaagacacgacttatcgccactggcagcagccactggtaacaggattagcagagcgaggtatgtaggcggtgctacagagttcttgaagtggtggcctaactacggctacactagaagaacagtatttggtatctgcgctctgctgaagccagttaccttcggaaaaagagttggtagctcttgatccggcaaacaaaccaccgctggtagcggtggtttttttgtttgcaagcagcagattacgcgcagaaaaaaaggatctcaagaagatcctttgatcttttctacggggtctgacgctctattcaacaaagccgccgtcccgtcaagtcagcgtaaatgggtagggggcttcaaatcgtcctcgtgataccaattcggagcctgcttttttgtacaaacttgttgataatggcaattcaaggatcttcacctagatccttttaaattaaaaatgaagttttaaatcaatctaaagtatatatgagtaaacttggtctgacagttaccaatgcttaatcagtgaggcacctatctcagcgatctgtctatttcgttcatccatagttgcctgactccccgtcgtgtagataactacgatacgggagggcttaccatctggccccagtgctgcaatgataccgcgagagccacgctcaccggctccagatttatcagcaataaaccagccagccggaagggccgagcgcagaagtggtcctgcaactttatccgcctccatccagtctattaattgttgccgggaagctagagtaagtagttcgccagttaatagtttgcgcaacgttgttgccattgctacaggcatcgtggtgtcacgctcgtcgtttggtatggcttcattcagctccggttcccaacgatcaaggcgagttacatgatcccccatgttgtgcaaaaaagcggttagctccttcggtcctccgatcgttgtcagaagtaagttggccgcagtgttatcactcatggttatggcagcactgcataattctcttactgtcatgccatccgtaagatgcttttctgtgactggtgagtactcaaccaagtcattctgagaatagtgtatgcggcgaccgagttgctcttgcccggcgtcaatacgggataataccgcgccacatagcagaactttaaaagtgctcatcattggaaaacgttcttcggggcgaaaactctcaaggatcttaccgctgttgagatccagttcgatgtaacccactcgtgcacccaactgatcttcagcatcttttactttcaccagcgtttctgggtgagcaaaaacaggaaggcaaaatgccgcaaaaaagggaataagggcgacacggaaatgttgaatactcatactcttcctttttcaatattattgaagcatttatcagggttattgtctcatgagcggatacatatttgaatgtatttagaaaaataaacaaataggggttccgcgcacatttccccgaaaagtgccagatacctgaaacaaaacccatcgtacggccaaggaagtctccaataactgtgatccaccacaagcgccagggttttcccagtcacgacgttgtaaaacgacggccagtcatgcataatccgcacgcatctggaataaggaagtgccattccgcctgacct

SEQ ID NO: 419 - DNA, 3774 bp, synthetic construct
  source 1..3774: mol_type = other DNA
tcgagctcggtacccggggaaaaatacaaaaattaaccaagcatggtagtgtgcccctgtaatcccagctactcaggaggctgagacaggagaatcatttgaaccggggaggcggaggttgtagtgagccaagattgtgccactgcactccagcttgggtggcagagcgagactgtctcaacgaagtaagaataagaatacataatagaataacaacatttaccttggtaactaagtgaatatttactctggtggatgtaaggggaaaataaagaaaaaacgcccaaagcactgattgtttgttcatcagaatggaagccatgggtgctggtgcaacggggagggctatggatggaccaaggctccttcttcttttgctcttgggcgttagtctgggtggagctaaagaggcatgccccaccggactttacacacattccggtgagtgttgcaaggcctgcaacctgggagaaggcgtcgctcaaccctgcggggcgaatcaaaccgtatgcgaaccttgcctcgattctgttacattctccgatgtcgtctctgcgacggaaccctgcaagccatgcacggaatgtgtcgggttgcaaagtatgtcagctccttgcgttgaagcagacgatgcggtgtgtagatgtgcctatgggtattatcaagacgaaacgacgggacggtgtgaagcatgtcgagtatgcgaggcgggcagtggcctcgtcttctcttgtcaggacaagcaaaacactgtctgtgaagaatgccctgatgggacttatagtgatgaggcgaatcacgtcgatccatgtcttccctgtactgtctgtgaagacactgagagacaattgcgagagtgtacgcgatgggccgacgcagagtgcgaggagatcccaggtcgatggataaccaggtcaacccctcctgagggatctgatagtaccgcgccctccacccaagaacccgaagctccacctgagcaagacctcatagcgtccacagtagcaggagttgtcacaaccgtcatgggaagttcacaaccagtagttaccaggggtaccacggataacctcattccggtgtactgcagcattctcgccgctgtggttgtcggacttgttgcatacattgccttcaaacgctggaatagccgcgccaagcgctcgggttcgggtgccaccaacttcagcctgctgaagcaggccggcgacgtggaggagaaccccggccccgctgtgtggatacaagctcaacaactgcagggagaagcccttcatcagatgcaagcgttatatggccagcattttcccattgaggtgcggcattatttatcccagtggattgaaagccaagcatggtaggtgaacaaggatgtttgcatcatattttgtgaaacacaagaatattggagtttgtttagaaagatgtcatgatggcaactttcaaagttgtattttgaaacattgttaaatgtgatccataaacaggtattgaaaatgtttcttctttttataggtgaaaggtatttaagctcctctagagtcgacctgcagaggctaggtggaggctcagtgatgataagtctgcgatggtggatgcatgtgtcatggtcatagctgtttcctgtgtgaaattgttatccgctcagagggcacaatcctattccgcgctatccgacaatctccaagacattaggtggagttcagttcggcgtatggcatatgtcgctggaaagaacatgtgagcaaaaggccagcaaaaggccaggaaccgtaaaaaggccgcgttgctggcgtttttccataggctccgcccccctgacgagcatcacaaaaatcgacgctcaagtcagaggtggcgaaacccgacaggactataaagataccaggcgtttccccctggaagctccctcgtgcgctctcctgttccgaccctgccgcttaccggatacctgtccgcctttctcccttcgggaagcgtggcgctttctcatagctcacgctgtaggtatctcagttcggtgtaggtcgttcgctccaagctgggctgtgtgcacgaaccccccgttcagcccgaccgctgcgccttatccggtaactatcgtcttgagtccaacccggtaagacacgacttatcgccactggcagcagccactggtaacaggattagcagagcgaggtatgtaggcggtgctacagagttcttgaagtggtggcctaactacggctacactagaagaacagtatttggtatctgcgctctgctgaagccagttaccttcggaaaaagagttggtagctcttgatccggcaaacaaaccaccgctggtagcggtggtttttttgtttgcaagcagcagattacgcgcagaaaaaaaggatctcaagaagatcctttgatcttttctacggggtctgacgctctattcaacaaagccgccgtcccgtcaagtcagcgtaaatgggtagggggcttcaaatcgtcctcgtgataccaattcggagcctgcttttttgtacaaacttgttgataatggcaattcaaggatcttcacctagatccttttaaattaaaaatgaagttttaaatcaatctaaagtatatatgagtaaacttggtctgacagttaccaatgcttaatcagtgaggcacctatctcagcgatctgtctatttcgttcatccatagttgcctgactccccgtcgtgtagataactacgatacgggagggcttaccatctggccccagtgctgcaatgataccgcgagagccacgctcaccggctccagatttatcagcaataaaccagccagccggaagggccgagcgcagaagtggtcctgcaactttatccgcctccatccagtctattaattgttgccgggaagctagagtaagtagttcgccagttaatagtttgcgcaacgttgttgccattgctacaggcatcgtggtgtcacgctcgtcgtttggtatggcttcattcagctccggttcccaacgatcaaggcgagttacatgatcccccatgttgtgcaaaaaagcggttagctccttcggtcctccgatcgttgtcagaagtaagttggccgcagtgttatcactcatggttatggcagcactgcataattctcttactgtcatgccatccgtaagatgcttttctgtgactggtgagtactcaaccaagtcattctgagaatagtgtatgcggcgaccgagttgctcttgcccggcgtcaatacgggataataccgcgccacatagcagaactttaaaagtgctcatcattggaaaacgttcttcggggcgaaaactctcaaggatcttaccgctgttgagatccagttcgatgtaacccactcgtgcacccaactgatcttcagcatcttttactttcaccagcgtttctgggtgagcaaaaacaggaaggcaaaatgccgcaaaaaagggaataagggcgacacggaaatgttgaatactcatactcttcctttttcaatattattgaagcatttatcagggttattgtctcatgagcggatacatatttgaatgtatttagaaaaataaacaaataggggttccgcgcacatttccccgaaaagtgccagatacctgaaacaaaacccatcgtacggccaaggaagtctccaataactgtgatccaccacaagcgccagggttttcccagtcacgacgttgtaaaacgacggccagtcatgcataatccgcacgcatctggaataaggaagtgccattccgcctgacct

SEQ ID NO: 420 - DNA, 3774 bp, synthetic construct
  source 1..3774: mol_type = other DNA
tcgagctcggtacccggggatgacatttcaaggcaagaatgaatatatggaagaagaaacttgtttcttctttacttacaaaaaggaaagcctggaagtgaatgatatgggtataagtaaaaacaagaaaaaaaacaaaaaacctttacgtaacgtttttgctgggagagaagactacgaagcacattttccaggaagtgtgggctgcaacgattgtgcgctcttaactaatcctgagtaaggtggccactttgacagtcttctcatgctgcctctgccaccttctctgcgagaagatacgatttcaactttaacacagcatgggtgctggtgcaacggggagggctatggatggaccaaggctccttcttcttttgctcttgggcgttagtctgggtggagctaaagaggcatgccccaccggactttacacacattccggtgagtgttgcaaggcctgcaacctgggagaaggcgtcgctcaaccctgcggggcgaatcaaaccgtatgcgaaccttgcctcgattctgttacattctccgatgtcgtctctgcgacggaaccctgcaagccatgcacggaatgtgtcgggttgcaaagtatgtcagctccttgcgttgaagcagacgatgcggtgtgtagatgtgcctatgggtattatcaagacgaaacgacgggacggtgtgaagcatgtcgagtatgcgaggcgggcagtggcctcgtcttctcttgtcaggacaagcaaaacactgtctgtgaagaatgccctgatgggacttatagtgatgaggcgaatcacgtcgatccatgtcttccctgtactgtctgtgaagacactgagagacaattgcgagagtgtacgcgatgggccgacgcagagtgcgaggagatcccaggtcgatggataaccaggtcaacccctcctgagggatctgatagtaccgcgccctccacccaagaacccgaagctccacctgagcaagacctcatagcgtccacagtagcaggagttgtcacaaccgtcatgggaagttcacaaccagtagttaccaggggtaccacggataacctcattccggtgtactgcagcattctcgccgctgtggttgtcggacttgttgcatacattgccttcaaacgctggaatagccgcgccaagcgctcgggttcgggtgccaccaacttcagcctgctgaagcaggccggcgacgtggaggagaaccccggccccatcgaaacatacaatcaaacttctccccgatctgcggccactggactgcccatcagcatgaaaatttttatgtatttacttactgtttttcttatcacccagatgattgggtcagcactttttgctgtgtatcttcatagaaggttggacaaggtaagatgaaccacaagcctttattaactaaatttggggtccttactaattcataggttggttctacccaaatgatggatgatggtagaaaccaaatagaagaatggtcttgtggcataatgtttgttgcctagtcaatgaagtctctcctctagagtcgacctgcagaggctaggtggaggctcagtgatgataagtctgcgatggtggatgcatgtgtcatggtcatagctgtttcctgtgtgaaattgttatccgctcagagggcacaatcctattccgcgctatccgacaatctccaagacattaggtggagttcagttcggcgtatggcatatgtcgctggaaagaacatgtgagcaaaaggccagcaaaaggccaggaaccgtaaaaaggccgcgttgctggcgtttttccataggctccgcccccctgacgagcatcacaaaaatcgacgctcaagtcagaggtggcgaaacccgacaggactataaagataccaggcgtttccccctggaagctccctcgtgcgctctcctgttccgaccctgccgcttaccggatacctgtccgcctttctcccttcgggaagcgtggcgctttctcatagctcacgctgtaggtatctcagttcggtgtaggtcgttcgctccaagctgggctgtgtgcacgaaccccccgttcagcccgaccgctgcgccttatccggtaactatcgtcttgagtccaacccggtaagacacgacttatcgccactggcagcagccactggtaacaggattagcagagcgaggtatgtaggcggtgctacagagttcttgaagtggtggcctaactacggctacactagaagaacagtatttggtatctgcgctctgctgaagccagttaccttcggaaaaagagttggtagctcttgatccggcaaacaaaccaccgctggtagcggtggtttttttgtttgcaagcagcagattacgcgcagaaaaaaaggatctcaagaagatcctttgatcttttctacggggtctgacgctctattcaacaaagccgccgtcccgtcaagtcagcgtaaatgggtagggggcttcaaatcgtcctcgtgataccaattcggagcctgcttttttgtacaaacttgttgataatggcaattcaaggatcttcacctagatccttttaaattaaaaatgaagttttaaatcaatctaaagtatatatgagtaaacttggtctgacagttaccaatgcttaatcagtgaggcacctatctcagcgatctgtctatttcgttcatccatagttgcctgactccccgtcgtgtagataactacgatacgggagggcttaccatctggccccagtgctgcaatgataccgcgagagccacgctcaccggctccagatttatcagcaataaaccagccagccggaagggccgagcgcagaagtggtcctgcaactttatccgcctccatccagtctattaattgttgccgggaagctagagtaagtagttcgccagttaatagtttgcgcaacgttgttgccattgctacaggcatcgtggtgtcacgctcgtcgtttggtatggcttcattcagctccggttcccaacgatcaaggcgagttacatgatcccccatgttgtgcaaaaaagcggttagctccttcggtcctccgatcgttgtcagaagtaagttggccgcagtgttatcactcatggttatggcagcactgcataattctcttactgtcatgccatccgtaagatgcttttctgtgactggtgagtactcaaccaagtcattctgagaatagtgtatgcggcgaccgagttgctcttgcccggcgtcaatacgggataataccgcgccacatagcagaactttaaaagtgctcatcattggaaaacgttcttcggggcgaaaactctcaaggatcttaccgctgttgagatccagttcgatgtaacccactcgtgcacccaactgatcttcagcatcttttactttcaccagcgtttctgggtgagcaaaaacaggaaggcaaaatgccgcaaaaaagggaataagggcgacacggaaatgttgaatactcatactcttcctttttcaatattattgaagcatttatcagggttattgtctcatgagcggatacatatttgaatgtatttagaaaaataaacaaataggggttccgcgcacatttccccgaaaagtgccagatacctgaaacaaaacccatcgtacggccaaggaagtctccaataactgtgatccaccacaagcgccagggttttcccagtcacgacgttgtaaaacgacggccagtcatgcataatccgcacgcatctggaataaggaagtgccattccgcctgacct

SEQ ID NO: 421 - DNA, 3774 bp, synthetic construct
  source 1..3774: mol_type = other DNA
tcgagctcggtacccggggaactgaggccgtggctgtgtgtccctctgagagttggagcggggctgggcccgaattcgaccgcagcaggattctctctcatttctgagccccggaggtggcagagcggcagacccgggcaagtgaaccctagggctgcaggagcccaggccccgacgccggcgcagaggggacggaagggcccgcccccagcccagcgtgcacagaggccatagccaaggccttaaggctcatccaaccggggactcatatcccccccaccggcagcgcggcgccccagcctctaccggtgcccgccgagatgggtgctggtgcaacggggagggctatggatggaccaaggctccttcttcttttgctcttgggcgttagtctgggtggagctaaagaggcatgccccaccggactttacacacattccggtgagtgttgcaaggcctgcaacctgggagaaggcgtcgctcaaccctgcggggcgaatcaaaccgtatgcgaaccttgcctcgattctgttacattctccgatgtcgtctctgcgacggaaccctgcaagccatgcacggaatgtgtcgggttgcaaagtatgtcagctccttgcgttgaagcagacgatgcggtgtgtagatgtgcctatgggtattatcaagacgaaacgacgggacggtgtgaagcatgtcgagtatgcgaggcgggcagtggcctcgtcttctcttgtcaggacaagcaaaacactgtctgtgaagaatgccctgatgggacttatagtgatgaggcgaatcacgtcgatccatgtcttccctgtactgtctgtgaagacactgagagacaattgcgagagtgtacgcgatgggccgacgcagagtgcgaggagatcccaggtcgatggataaccaggtcaacccctcctgagggatctgatagtaccgcgccctccacccaagaacccgaagctccacctgagcaagacctcatagcgtccacagtagcaggagttgtcacaaccgtcatgggaagttcacaaccagtagttaccaggggtaccacggataacctcattccggtgtactgcagcattctcgccgctgtggttgtcggacttgttgcatacattgccttcaaacgctggaatagccgcgccaagcgctcgggttcgggtgccaccaacttcagcctgctgaagcaggccggcgacgtggaggagaaccccggccccctgctgccgcggtcggtgtcatcggagcgcgcccctggggtgccggagccggaggagctgtgggaggcagagatggagcggctgcgcggctctgggacgcccgtgcgcgggctgccctatgccatgatggacaagcgcctcatctggtgggtgccacgcgggcgccagacggtgcgtggggggggtgctgcgaggctgccccgtcggatggtgtgggagcaccccgtctgcttggcccgggtgggcagggcgggtgactcaggggcgcccctgtcaccacccccgtccaggcagctgcggtcctctagagtcgacctgcagaggctaggtggaggctcagtgatgataagtctgcgatggtggatgcatgtgtcatggtcatagctgtttcctgtgtgaaattgttatccgctcagagggcacaatcctattccgcgctatccgacaatctccaagacattaggtggagttcagttcggcgtatggcatatgtcgctggaaagaacatgtgagcaaaaggccagcaaaaggccaggaaccgtaaaaaggccgcgttgctggcgtttttccataggctccgcccccctgacgagcatcacaaaaatcgacgctcaagtcagaggtggcgaaacccgacaggactataaagataccaggcgtttccccctggaagctccctcgtgcgctctcctgttccgaccctgccgcttaccggatacctgtccgcctttctcccttcgggaagcgtggcgctttctcatagctcacgctgtaggtatctcagttcggtgtaggtcgttcgctccaagctgggctgtgtgcacgaaccccccgttcagcccgaccgctgcgccttatccggtaactatcgtcttgagtccaacccggtaagacacgacttatcgccactggcagcagccactggtaacaggattagcagagcgaggtatgtaggcggtgctacagagttcttgaagtggtggcctaactacggctacactagaagaacagtatttggtatctgcgctctgctgaagccagttaccttcggaaaaagagttggtagctcttgatccggcaaacaaaccaccgctggtagcggtggtttttttgtttgcaagcagcagattacgcgcagaaaaaaaggatctcaagaagatcctttgatcttttctacggggtctgacgctctattcaacaaagccgccgtcccgtcaagtcagcgtaaatgggtagggggcttcaaatcgtcctcgtgataccaattcggagcctgcttttttgtacaaacttgttgataatggcaattcaaggatcttcacctagatccttttaaattaaaaatgaagttttaaatcaatctaaagtatatatgagtaaacttggtctgacagttaccaatgcttaatcagtgaggcacctatctcagcgatctgtctatttcgttcatccatagttgcctgactccccgtcgtgtagataactacgatacgggagggcttaccatctggccccagtgctgcaatgataccgcgagagccacgctcaccggctccagatttatcagcaataaaccagccagccggaagggccgagcgcagaagtggtcctgcaactttatccgcctccatccagtctattaattgttgccgggaagctagagtaagtagttcgccagttaatagtttgcgcaacgttgttgccattgctacaggcatcgtggtgtcacgctcgtcgtttggtatggcttcattcagctccggttcccaacgatcaaggcgagttacatgatcccccatgttgtgcaaaaaagcggttagctccttcggtcctccgatcgttgtcagaagtaagttggccgcagtgttatcactcatggttatggcagcactgcataattctcttactgtcatgccatccgtaagatgcttttctgtgactggtgagtactcaaccaagtcattctgagaatagtgtatgcggcgaccgagttgctcttgcccggcgtcaatacgggataataccgcgccacatagcagaactttaaaagtgctcatcattggaaaacgttcttcggggcgaaaactctcaaggatcttaccgctgttgagatccagttcgatgtaacccactcgtgcacccaactgatcttcagcatcttttactttcaccagcgtttctgggtgagcaaaaacaggaaggcaaaatgccgcaaaaaagggaataagggcgacacggaaatgttgaatactcatactcttcctttttcaatattattgaagcatttatcagggttattgtctcatgagcggatacatatttgaatgtatttagaaaaataaacaaataggggttccgcgcacatttccccgaaaagtgccagatacctgaaacaaaacccatcgtacggccaaggaagtctccaataactgtgatccaccacaagcgccagggttttcccagtcacgacgttgtaaaacgacggccagtcatgcataatccgcacgcatctggaataaggaagtgccattccgcctgacct

SEQ ID NO: 422 - DNA, 3774 bp, synthetic construct
  source 1..3774: mol_type = other DNA
tcgagctcggtacccggggagttagccacccgctgcctccccttccgcagtccggctcgcagccgctcagctacctctaaagcccggagcaggaaagtccgcgcaggcctggatggcccgggtggtaatctagcaggcctgcacactgcgcatgcgcagggggtggactgccaggtcggctcagggagccgtgacgagtccggaagcgcctgcgcgcgctcctccgtacgagaactagttttgttccgtgccctctggactggaaccttttggagagaacccccggcaggacgaacccggcacgcgccagcaccgcggcaatgggtgctggtgcaacggggagggctatggatggaccaaggctccttcttcttttgctcttgggcgttagtctgggtggagctaaagaggcatgccccaccggactttacacacattccggtgagtgttgcaaggcctgcaacctgggagaaggcgtcgctcaaccctgcggggcgaatcaaaccgtatgcgaaccttgcctcgattctgttacattctccgatgtcgtctctgcgacggaaccctgcaagccatgcacggaatgtgtcgggttgcaaagtatgtcagctccttgcgttgaagcagacgatgcggtgtgtagatgtgcctatgggtattatcaagacgaaacgacgggacggtgtgaagcatgtcgagtatgcgaggcgggcagtggcctcgtcttctcttgtcaggacaagcaaaacactgtctgtgaagaatgccctgatgggacttatagtgatgaggcgaatcacgtcgatccatgtcttccctgtactgtctgtgaagacactgagagacaattgcgagagtgtacgcgatgggccgacgcagagtgcgaggagatcccaggtcgatggataaccaggtcaacccctcctgagggatctgatagtaccgcgccctccacccaagaacccgaagctccacctgagcaagacctcatagcgtccacagtagcaggagttgtcacaaccgtcatgggaagttcacaaccagtagttaccaggggtaccacggataacctcattccggtgtactgcagcattctcgccgctgtggttgtcggacttgttgcatacattgccttcaaacgctggaatagccgcgccaagcgctcgggttcgggtgccaccaacttcagcctgctgaagcaggccggcgacgtggaggagaaccccggcccctccagcaatagttttccttacaatgagcagtccggaggaggggaggcgacggagctgggtcaggaggcgacctcaaccatttccccctcgggggccttcggcctctttagcagcgatttgaagaagtgaggagaaaggtttgggttgcggggatgggagggaggagctgcggactcggaggagtgggcgccagggtgggcttcctggagaggagcggggtcgccctgaggtctgagcagggcagggcggtaacgtgtcccgcgggtgggtaggtggggttggttggcggtggtgggagtttcctctagagtcgacctgcagaggctaggtggaggctcagtgatgataagtctgcgatggtggatgcatgtgtcatggtcatagctgtttcctgtgtgaaattgttatccgctcagagggcacaatcctattccgcgctatccgacaatctccaagacattaggtggagttcagttcggcgtatggcatatgtcgctggaaagaacatgtgagcaaaaggccagcaaaaggccaggaaccgtaaaaaggccgcgttgctggcgtttttccataggctccgcccccctgacgagcatcacaaaaatcgacgctcaagtcagaggtggcgaaacccgacaggactataaagataccaggcgtttccccctggaagctccctcgtgcgctctcctgttccgaccctgccgcttaccggatacctgtccgcctttctcccttcgggaagcgtggcgctttctcatagctcacgctgtaggtatctcagttcggtgtaggtcgttcgctccaagctgggctgtgtgcacgaaccccccgttcagcccgaccgctgcgccttatccggtaactatcgtcttgagtccaacccggtaagacacgacttatcgccactggcagcagccactggtaacaggattagcagagcgaggtatgtaggcggtgctacagagttcttgaagtggtggcctaactacggctacactagaagaacagtatttggtatctgcgctctgctgaagccagttaccttcggaaaaagagttggtagctcttgatccggcaaacaaaccaccgctggtagcggtggtttttttgtttgcaagcagcagattacgcgcagaaaaaaaggatctcaagaagatcctttgatcttttctacggggtctgacgctctattcaacaaagccgccgtcccgtcaagtcagcgtaaatgggtagggggcttcaaatcgtcctcgtgataccaattcggagcctgcttttttgtacaaacttgttgataatggcaattcaaggatcttcacctagatccttttaaattaaaaatgaagttttaaatcaatctaaagtatatatgagtaaacttggtctgacagttaccaatgcttaatcagtgaggcacctatctcagcgatctgtctatttcgttcatccatagttgcctgactccccgtcgtgtagataactacgatacgggagggcttaccatctggccccagtgctgcaatgataccgcgagagccacgctcaccggctccagatttatcagcaataaaccagccagccggaagggccgagcgcagaagtggtcctgcaactttatccgcctccatccagtctattaattgttgccgggaagctagagtaagtagttcgccagttaatagtttgcgcaacgttgttgccattgctacaggcatcgtggtgtcacgctcgtcgtttggtatggcttcattcagctccggttcccaacgatcaaggcgagttacatgatcccccatgttgtgcaaaaaagcggttagctccttcggtcctccgatcgttgtcagaagtaagttggccgcagtgttatcactcatggttatggcagcactgcataattctcttactgtcatgccatccgtaagatgcttttctgtgactggtgagtactcaaccaagtcattctgagaatagtgtatgcggcgaccgagttgctcttgcccggcgtcaatacgggataataccgcgccacatagcagaactttaaaagtgctcatcattggaaaacgttcttcggggcgaaaactctcaaggatcttaccgctgttgagatccagttcgatgtaacccactcgtgcacccaactgatcttcagcatcttttactttcaccagcgtttctgggtgagcaaaaacaggaaggcaaaatgccgcaaaaaagggaataagggcgacacggaaatgttgaatactcatactcttcctttttcaatattattgaagcatttatcagggttattgtctcatgagcggatacatatttgaatgtatttagaaaaataaacaaataggggttccgcgcacatttccccgaaaagtgccagatacctgaaacaaaacccatcgtacggccaaggaagtctccaataactgtgatccaccacaagcgccagggttttcccagtcacgacgttgtaaaacgacggccagtcatgcataatccgcacgcatctggaataaggaagtgccattccgcctgacct

SEQ ID NO: 423 - DNA, 3774 bp, synthetic construct
  source 1..3774: mol_type = other DNA
tcgagctcggtacccggggagtgagagtcagcctggattcaaagtgttgacaagttgctgaaaaggaagccagtgagaggactgtggcacgcagaggaagtggagccctgtcttcggtcacaccattgatggaggacagatggacagccgtatggccagtcacctctcctcttaaacctttggagagtggtcctttgtcctctgctggacacataataggaattctaacacattctctgaattcacttttcataaaaacgtaaaatcagactgctctgtacaaccaggctcaactgttgcatcgtagcagatttgcaaacatgggtgctggtgcaacggggagggctatggatggaccaaggctccttcttcttttgctcttgggcgttagtctgggtggagctaaagaggcatgccccaccggactttacacacattccggtgagtgttgcaaggcctgcaacctgggagaaggcgtcgctcaaccctgcggggcgaatcaaaccgtatgcgaaccttgcctcgattctgttacattctccgatgtcgtctctgcgacggaaccctgcaagccatgcacggaatgtgtcgggttgcaaagtatgtcagctccttgcgttgaagcagacgatgcggtgtgtagatgtgcctatgggtattatcaagacgaaacgacgggacggtgtgaagcatgtcgagtatgcgaggcgggcagtggcctcgtcttctcttgtcaggacaagcaaaacactgtctgtgaagaatgccctgatgggacttatagtgatgaggcgaatcacgtcgatccatgtcttccctgtactgtctgtgaagacactgagagacaattgcgagagtgtacgcgatgggccgacgcagagtgcgaggagatcccaggtcgatggataaccaggtcaacccctcctgagggatctgatagtaccgcgccctccacccaagaacccgaagctccacctgagcaagacctcatagcgtccacagtagcaggagttgtcacaaccgtcatgggaagttcacaaccagtagttaccaggggtaccacggataacctcattccggtgtactgcagcattctcgccgctgtggttgtcggacttgttgcatacattgccttcaaacgctggaatagccgcgccaagcgctcgggttcgggtgccaccaacttcagcctgctgaagcaggccggcgacgtggaggagaaccccggccccagtgctgaggggtaccagtacagagcgctgtatgattataaaaaggaaagagaagaagatattgacttgcacttgggtgacatattgactgtgaataaagggtccttagtagctcttggattcagtgatggacaggaagccaggcctgaagaaattggctggttaaatggctataatgaaaccacaggggaaaggggggactttccgggaacttacgtagaatatattggaaggaaaaaaatctcgcctcccacaccaaagccccggccacctcggcctcttcctgttgcaccaggttcttcctctagagtcgacctgcagaggctaggtggaggctcagtgatgataagtctgcgatggtggatgcatgtgtcatggtcatagctgtttcctgtgtgaaattgttatccgctcagagggcacaatcctattccgcgctatccgacaatctccaagacattaggtggagttcagttcggcgtatggcatatgtcgctggaaagaacatgtgagcaaaaggccagcaaaaggccaggaaccgtaaaaaggccgcgttgctggcgtttttccataggctccgcccccctgacgagcatcacaaaaatcgacgctcaagtcagaggtggcgaaacccgacaggactataaagataccaggcgtttccccctggaagctccctcgtgcgctctcctgttccgaccctgccgcttaccggatacctgtccgcctttctcccttcgggaagcgtggcgctttctcatagctcacgctgtaggtatctcagttcggtgtaggtcgttcgctccaagctgggctgtgtgcacgaaccccccgttcagcccgaccgctgcgccttatccggtaactatcgtcttgagtccaacccggtaagacacgacttatcgccactggcagcagccactggtaacaggattagcagagcgaggtatgtaggcggtgctacagagttcttgaagtggtggcctaactacggctacactagaagaacagtatttggtatctgcgctctgctgaagccagttaccttcggaaaaagagttggtagctcttgatccggcaaacaaaccaccgctggtagcggtggtttttttgtttgcaagcagcagattacgcgcagaaaaaaaggatctcaagaagatcctttgatcttttctacggggtctgacgctctattcaacaaagccgccgtcccgtcaagtcagcgtaaatgggtagggggcttcaaatcgtcctcgtgataccaattcggagcctgcttttttgtacaaacttgttgataatggcaattcaaggatcttcacctagatccttttaaattaaaaatgaagttttaaatcaatctaaagtatatatgagtaaacttggtctgacagttaccaatgcttaatcagtgaggcacctatctcagcgatctgtctatttcgttcatccatagttgcctgactccccgtcgtgtagataactacgatacgggagggcttaccatctggccccagtgctgcaatgataccgcgagagccacgctcaccggctccagatttatcagcaataaaccagccagccggaagggccgagcgcagaagtggtcctgcaactttatccgcctccatccagtctattaattgttgccgggaagctagagtaagtagttcgccagttaatagtttgcgcaacgttgttgccattgctacaggcatcgtggtgtcacgctcgtcgtttggtatggcttcattcagctccggttcccaacgatcaaggcgagttacatgatcccccatgttgtgcaaaaaagcggttagctccttcggtcctccgatcgttgtcagaagtaagttggccgcagtgttatcactcatggttatggcagcactgcataattctcttactgtcatgccatccgtaagatgcttttctgtgactggtgagtactcaaccaagtcattctgagaatagtgtatgcggcgaccgagttgctcttgcccggcgtcaatacgggataataccgcgccacatagcagaactttaaaagtgctcatcattggaaaacgttcttcggggcgaaaactctcaaggatcttaccgctgttgagatccagttcgatgtaacccactcgtgcacccaactgatcttcagcatcttttactttcaccagcgtttctgggtgagcaaaaacaggaaggcaaaatgccgcaaaaaagggaataagggcgacacggaaatgttgaatactcatactcttcctttttcaatattattgaagcatttatcagggttattgtctcatgagcggatacatatttgaatgtatttagaaaaataaacaaataggggttccgcgcacatttccccgaaaagtgccagatacctgaaacaaaacccatcgtacggccaaggaagtctccaataactgtgatccaccacaagcgccagggttttcccagtcacgacgttgtaaaacgacggccagtcatgcataatccgcacgcatctggaataaggaagtgccattccgcctgacct

SEQ ID NO: 424 - DNA, 3774 bp, synthetic construct
  source 1..3774: mol_type = other DNA
tcgagctcggtacccggggaggctacccggaccactttgatccgaaggcactggaggcccagagggaaggaaagggaggggtggccggagcccgctagcgccccaggacagcctcgggttgccccaggcggtagccctgtgggacagtggttccccgtccgcggcctcgggggcggggcgtctgtaggcctcgccccgctgacgtcagccctgcggggcgctggcggagcgggcggcggagctgtcagtcccagcccaagggtagctggaggcgcgcaggccggctccgctccggccgcggacgatgcggcgcgcccaggatgggtgctggtgcaacggggagggctatggatggaccaaggctccttcttcttttgctcttgggcgttagtctgggtggagctaaagaggcatgccccaccggactttacacacattccggtgagtgttgcaaggcctgcaacctgggagaaggcgtcgctcaaccctgcggggcgaatcaaaccgtatgcgaaccttgcctcgattctgttacattctccgatgtcgtctctgcgacggaaccctgcaagccatgcacggaatgtgtcgggttgcaaagtatgtcagctccttgcgttgaagcagacgatgcggtgtgtagatgtgcctatgggtattatcaagacgaaacgacgggacggtgtgaagcatgtcgagtatgcgaggcgggcagtggcctcgtcttctcttgtcaggacaagcaaaacactgtctgtgaagaatgccctgatgggacttatagtgatgaggcgaatcacgtcgatccatgtcttccctgtactgtctgtgaagacactgagagacaattgcgagagtgtacgcgatgggccgacgcagagtgcgaggagatcccaggtcgatggataaccaggtcaacccctcctgagggatctgatagtaccgcgccctccacccaagaacccgaagctccacctgagcaagacctcatagcgtccacagtagcaggagttgtcacaaccgtcatgggaagttcacaaccagtagttaccaggggtaccacggataacctcattccggtgtactgcagcattctcgccgctgtggttgtcggacttgttgcatacattgccttcaaacgctggaatagccgcgccaagcgctcgggttcgggtgccaccaacttcagcctgctgaagcaggccggcgacgtggaggagaaccccggccccctgccgtgtctggttgtcctgctcgcggcgctcctcagcctccgtcttggctcagacgctcatggtaaggctccgggacgcggcccttccctgccctgccctctccgcgcccgctccattaaagttctccatccagtggagagccctggctggctggccctctggcagagcggtgcccgggtgctcccttactctggcaaacctggatctcaggctcacctgttgtggaagtggaagaggctgaaattgacaggaactgacggattgggaaggatagagaagtatgcgcaaggccaaacctcctctagagtcgacctgcagaggctaggtggaggctcagtgatgataagtctgcgatggtggatgcatgtgtcatggtcatagctgtttcctgtgtgaaattgttatccgctcagagggcacaatcctattccgcgctatccgacaatctccaagacattaggtggagttcagttcggcgtatggcatatgtcgctggaaagaacatgtgagcaaaaggccagcaaaaggccaggaaccgtaaaaaggccgcgttgctggcgtttttccataggctccgcccccctgacgagcatcacaaaaatcgacgctcaagtcagaggtggcgaaacccgacaggactataaagataccaggcgtttccccctggaagctccctcgtgcgctctcctgttccgaccctgccgcttaccggatacctgtccgcctttctcccttcgggaagcgtggcgctttctcatagctcacgctgtaggtatctcagttcggtgtaggtcgttcgctccaagctgggctgtgtgcacgaaccccccgttcagcccgaccgctgcgccttatccggtaactatcgtcttgagtccaacccggtaagacacgacttatcgccactggcagcagccactggtaacaggattagcagagcgaggtatgtaggcggtgctacagagttcttgaagtggtggcctaactacggctacactagaagaacagtatttggtatctgcgctctgctgaagccagttaccttcggaaaaagagttggtagctcttgatccggcaaacaaaccaccgctggtagcggtggtttttttgtttgcaagcagcagattacgcgcagaaaaaaaggatctcaagaagatcctttgatcttttctacggggtctgacgctctattcaacaaagccgccgtcccgtcaagtcagcgtaaatgggtagggggcttcaaatcgtcctcgtgataccaattcggagcctgcttttttgtacaaacttgttgataatggcaattcaaggatcttcacctagatccttttaaattaaaaatgaagttttaaatcaatctaaagtatatatgagtaaacttggtctgacagttaccaatgcttaatcagtgaggcacctatctcagcgatctgtctatttcgttcatccatagttgcctgactccccgtcgtgtagataactacgatacgggagggcttaccatctggccccagtgctgcaatgataccgcgagagccacgctcaccggctccagatttatcagcaataaaccagccagccggaagggccgagcgcagaagtggtcctgcaactttatccgcctccatccagtctattaattgttgccgggaagctagagtaagtagttcgccagttaatagtttgcgcaacgttgttgccattgctacaggcatcgtggtgtcacgctcgtcgtttggtatggcttcattcagctccggttcccaacgatcaaggcgagttacatgatcccccatgttgtgcaaaaaagcggttagctccttcggtcctccgatcgttgtcagaagtaagttggccgcagtgttatcactcatggttatggcagcactgcataattctcttactgtcatgccatccgtaagatgcttttctgtgactggtgagtactcaaccaagtcattctgagaatagtgtatgcggcgaccgagttgctcttgcccggcgtcaatacgggataataccgcgccacatagcagaactttaaaagtgctcatcattggaaaacgttcttcggggcgaaaactctcaaggatcttaccgctgttgagatccagttcgatgtaacccactcgtgcacccaactgatcttcagcatcttttactttcaccagcgtttctgggtgagcaaaaacaggaaggcaaaatgccgcaaaaaagggaataagggcgacacggaaatgttgaatactcatactcttcctttttcaatattattgaagcatttatcagggttattgtctcatgagcggatacatatttgaatgtatttagaaaaataaacaaataggggttccgcgcacatttccccgaaaagtgccagatacctgaaacaaaacccatcgtacggccaaggaagtctccaataactgtgatccaccacaagcgccagggttttcccagtcacgacgttgtaaaacgacggccagtcatgcataatccgcacgcatctggaataaggaagtgccattccgcctgacct

SEQ ID NO: 425 - DNA, 3774 bp, synthetic construct
  source 1..3774: mol_type = other DNA
tcgagctcggtacccggggagaacaacttttttgacttcctgcaaagaggacccttacagtatttttggagaagttagtaaaaccgaatctgacatcatcacctagcagttcatgcagctagcaagtggtttgttcttagggtaacagaggaggaaattgttcctcgtctgataagacaacagtggagagtatgcatttattgatttacttttacattgttgattcgtttttacagagaaaaacttctacagagataacaattattttgcttttcagaaggacgcatgctgtttcttagggacaccgctgacttccagatatgggtgctggtgcaacggggagggctatggatggaccaaggctccttcttcttttgctcttgggcgttagtctgggtggagctaaagaggcatgccccaccggactttacacacattccggtgagtgttgcaaggcctgcaacctgggagaaggcgtcgctcaaccctgcggggcgaatcaaaccgtatgcgaaccttgcctcgattctgttacattctccgatgtcgtctctgcgacggaaccctgcaagccatgcacggaatgtgtcgggttgcaaagtatgtcagctccttgcgttgaagcagacgatgcggtgtgtagatgtgcctatgggtattatcaagacgaaacgacgggacggtgtgaagcatgtcgagtatgcgaggcgggcagtggcctcgtcttctcttgtcaggacaagcaaaacactgtctgtgaagaatgccctgatgggacttatagtgatgaggcgaatcacgtcgatccatgtcttccctgtactgtctgtgaagacactgagagacaattgcgagagtgtacgcgatgggccgacgcagagtgcgaggagatcccaggtcgatggataaccaggtcaacccctcctgagggatctgatagtaccgcgccctccacccaagaacccgaagctccacctgagcaagacctcatagcgtccacagtagcaggagttgtcacaaccgtcatgggaagttcacaaccagtagttaccaggggtaccacggataacctcattccggtgtactgcagcattctcgccgctgtggttgtcggacttgttgcatacattgccttcaaacgctggaatagccgcgccaagcgctcgggttcgggtgccaccaacttcagcctgctgaagcaggccggcgacgtggaggagaaccccggccccacgatgtatttgtggcttaaactcttagcatttggctttgcctttctggacacagaagtatttgtgacaggtaagtacaaggatattaatattttttaaattatcttgtctctgctggaggaatgtttgaaatagacataaaaataatttaaatgtgttggtaactggaagtgagaagcctgctgtaaaccatcaagattgttgtctcagggagacatagctagttgtgtgacagaatacattgtttctgtttacaaagacataaatgtttcgggacaaaaaatacaattttaaaaggaatcctctagagtcgacctgcagaggctaggtggaggctcagtgatgataagtctgcgatggtggatgcatgtgtcatggtcatagctgtttcctgtgtgaaattgttatccgctcagagggcacaatcctattccgcgctatccgacaatctccaagacattaggtggagttcagttcggcgtatggcatatgtcgctggaaagaacatgtgagcaaaaggccagcaaaaggccaggaaccgtaaaaaggccgcgttgctggcgtttttccataggctccgcccccctgacgagcatcacaaaaatcgacgctcaagtcagaggtggcgaaacccgacaggactataaagataccaggcgtttccccctggaagctccctcgtgcgctctcctgttccgaccctgccgcttaccggatacctgtccgcctttctcccttcgggaagcgtggcgctttctcatagctcacgctgtaggtatctcagttcggtgtaggtcgttcgctccaagctgggctgtgtgcacgaaccccccgttcagcccgaccgctgcgccttatccggtaactatcgtcttgagtccaacccggtaagacacgacttatcgccactggcagcagccactggtaacaggattagcagagcgaggtatgtaggcggtgctacagagttcttgaagtggtggcctaactacggctacactagaagaacagtatttggtatctgcgctctgctgaagccagttaccttcggaaaaagagttggtagctcttgatccggcaaacaaaccaccgctggtagcggtggtttttttgtttgcaagcagcagattacgcgcagaaaaaaaggatctcaagaagatcctttgatcttttctacggggtctgacgctctattcaacaaagccgccgtcccgtcaagtcagcgtaaatgggtagggggcttcaaatcgtcctcgtgataccaattcggagcctgcttttttgtacaaacttgttgataatggcaattcaaggatcttcacctagatccttttaaattaaaaatgaagttttaaatcaatctaaagtatatatgagtaaacttggtctgacagttaccaatgcttaatcagtgaggcacctatctcagcgatctgtctatttcgttcatccatagttgcctgactccccgtcgtgtagataactacgatacgggagggcttaccatctggccccagtgctgcaatgataccgcgagagccacgctcaccggctccagatttatcagcaataaaccagccagccggaagggccgagcgcagaagtggtcctgcaactttatccgcctccatccagtctattaattgttgccgggaagctagagtaagtagttcgccagttaatagtttgcgcaacgttgttgccattgctacaggcatcgtggtgtcacgctcgtcgtttggtatggcttcattcagctccggttcccaacgatcaaggcgagttacatgatcccccatgttgtgcaaaaaagcggttagctccttcggtcctccgatcgttgtcagaagtaagttggccgcagtgttatcactcatggttatggcagcactgcataattctcttactgtcatgccatccgtaagatgcttttctgtgactggtgagtactcaaccaagtcattctgagaatagtgtatgcggcgaccgagttgctcttgcccggcgtcaatacgggataataccgcgccacatagcagaactttaaaagtgctcatcattggaaaacgttcttcggggcgaaaactctcaaggatcttaccgctgttgagatccagttcgatgtaacccactcgtgcacccaactgatcttcagcatcttttactttcaccagcgtttctgggtgagcaaaaacaggaaggcaaaatgccgcaaaaaagggaataagggcgacacggaaatgttgaatactcatactcttcctttttcaatattattgaagcatttatcagggttattgtctcatgagcggatacatatttgaatgtatttagaaaaataaacaaataggggttccgcgcacatttccccgaaaagtgccagatacctgaaacaaaacccatcgtacggccaaggaagtctccaataactgtgatccaccacaagcgccagggttttcccagtcacgacgttgtaaaacgacggccagtcatgcataatccgcacgcatctggaataaggaagtgccattccgcctgacct

SEQ ID NO: 426 - DNA, 3774 bp, synthetic construct
  source 1..3774: mol_type = other DNA
tcgagctcggtacccggggatcaacaaacatgcagtggggcaacaccacgccaggctctgttgcagaggctgagggtacagattgagagggtggctcagagtggcctggggccagggagaagggggcttgcaggttagagggaaggagaggctggggaaggcaagcaggcatcagccacagagggaagaatagggagcccctggagatgatgctgggaccttaaaagccagactgaggggtgtcctgggggaggtggggaccactggaagatcagagttgacctgaagggagaaatgctcttatgctgtgtgcccccagaatgggtgctggtgcaacggggagggctatggatggaccaaggctccttcttcttttgctcttgggcgttagtctgggtggagctaaagaggcatgccccaccggactttacacacattccggtgagtgttgcaaggcctgcaacctgggagaaggcgtcgctcaaccctgcggggcgaatcaaaccgtatgcgaaccttgcctcgattctgttacattctccgatgtcgtctctgcgacggaaccctgcaagccatgcacggaatgtgtcgggttgcaaagtatgtcagctccttgcgttgaagcagacgatgcggtgtgtagatgtgcctatgggtattatcaagacgaaacgacgggacggtgtgaagcatgtcgagtatgcgaggcgggcagtggcctcgtcttctcttgtcaggacaagcaaaacactgtctgtgaagaatgccctgatgggacttatagtgatgaggcgaatcacgtcgatccatgtcttccctgtactgtctgtgaagacactgagagacaattgcgagagtgtacgcgatgggccgacgcagagtgcgaggagatcccaggtcgatggataaccaggtcaacccctcctgagggatctgatagtaccgcgccctccacccaagaacccgaagctccacctgagcaagacctcatagcgtccacagtagcaggagttgtcacaaccgtcatgggaagttcacaaccagtagttaccaggggtaccacggataacctcattccggtgtactgcagcattctcgccgctgtggttgtcggacttgttgcatacattgccttcaaacgctggaatagccgcgccaagcgctcgggttcgggtgccaccaacttcagcctgctgaagcaggccggcgacgtggaggagaaccccggccccagccggcaggtggtccgctcgagcaagttccgccacgtgtttggacagccggccaaggccgaccagtgctatgaagatgtgcgcgtctcacagaccacctgggacagtggcttctgtgctgtcaaccctaagtttgtggccctgatctgtgaggccagcgggggaggggccttcctggtgctgcccctgggcaaggtgagcccctggggccctggggggagcagctcctccaccggacccatggctctgtgcaggtcctgattaggtgacggtcaccaggccttccagggcctgtgttgctcctctagagtcgacctgcagaggctaggtggaggctcagtgatgataagtctgcgatggtggatgcatgtgtcatggtcatagctgtttcctgtgtgaaattgttatccgctcagagggcacaatcctattccgcgctatccgacaatctccaagacattaggtggagttcagttcggcgtatggcatatgtcgctggaaagaacatgtgagcaaaaggccagcaaaaggccaggaaccgtaaaaaggccgcgttgctggcgtttttccataggctccgcccccctgacgagcatcacaaaaatcgacgctcaagtcagaggtggcgaaacccgacaggactataaagataccaggcgtttccccctggaagctccctcgtgcgctctcctgttccgaccctgccgcttaccggatacctgtccgcctttctcccttcgggaagcgtggcgctttctcatagctcacgctgtaggtatctcagttcggtgtaggtcgttcgctccaagctgggctgtgtgcacgaaccccccgttcagcccgaccgctgcgccttatccggtaactatcgtcttgagtccaacccggtaagacacgacttatcgccactggcagcagccactggtaacaggattagcagagcgaggtatgtaggcggtgctacagagttcttgaagtggtggcctaactacggctacactagaagaacagtatttggtatctgcgctctgctgaagccagttaccttcggaaaaagagttggtagctcttgatccggcaaacaaaccaccgctggtagcggtggtttttttgtttgcaagcagcagattacgcgcagaaaaaaaggatctcaagaagatcctttgatcttttctacggggtctgacgctctattcaacaaagccgccgtcccgtcaagtcagcgtaaatgggtagggggcttcaaatcgtcctcgtgataccaattcggagcctgcttttttgtacaaacttgttgataatggcaattcaaggatcttcacctagatccttttaaattaaaaatgaagttttaaatcaatctaaagtatatatgagtaaacttggtctgacagttaccaatgcttaatcagtgaggcacctatctcagcgatctgtctatttcgttcatccatagttgcctgactccccgtcgtgtagataactacgatacgggagggcttaccatctggccccagtgctgcaatgataccgcgagagccacgctcaccggctccagatttatcagcaataaaccagccagccggaagggccgagcgcagaagtggtcctgcaactttatccgcctccatccagtctattaattgttgccgggaagctagagtaagtagttcgccagttaatagtttgcgcaacgttgttgccattgctacaggcatcgtggtgtcacgctcgtcgtttggtatggcttcattcagctccggttcccaacgatcaaggcgagttacatgatcccccatgttgtgcaaaaaagcggttagctccttcggtcctccgatcgttgtcagaagtaagttggccgcagtgttatcactcatggttatggcagcactgcataattctcttactgtcatgccatccgtaagatgcttttctgtgactggtgagtactcaaccaagtcattctgagaatagtgtatgcggcgaccgagttgctcttgcccggcgtcaatacgggataataccgcgccacatagcagaactttaaaagtgctcatcattggaaaacgttcttcggggcgaaaactctcaaggatcttaccgctgttgagatccagttcgatgtaacccactcgtgcacccaactgatcttcagcatcttttactttcaccagcgtttctgggtgagcaaaaacaggaaggcaaaatgccgcaaaaaagggaataagggcgacacggaaatgttgaatactcatactcttcctttttcaatattattgaagcatttatcagggttattgtctcatgagcggatacatatttgaatgtatttagaaaaataaacaaataggggttccgcgcacatttccccgaaaagtgccagatacctgaaacaaaacccatcgtacggccaaggaagtctccaataactgtgatccaccacaagcgccagggttttcccagtcacgacgttgtaaaacgacggccagtcatgcataatccgcacgcatctggaataaggaagtgccattccgcctgacct

SEQ ID NO: 427 - DNA, 3774 bp, synthetic construct
  source 1..3774: mol_type = other DNA
tcgagctcggtacccggggaaggcctctgccttgaacgtttccaagtgaggtaaaacccgcaggcccagaggcctctctacttcctgtgtggggttcagaaaccctcctcccctcccagcctcaggtgcctgcttcagaaaatggtgagtctctctcttataaagccctcctttttcatcctagcattgggaacaatggccccagggtccttatctctagcagatgttttgaaaaagtcatctgttttgctttttttccagaagtagtaagtctgctggcctccgccatcttagtaaagtaacagtcgcatgaaacaaagatgggtgctggtgcaacggggagggctatggatggaccaaggctccttcttcttttgctcttgggcgttagtctgggtggagctaaagaggcatgccccaccggactttacacacattccggtgagtgttgcaaggcctgcaacctgggagaaggcgtcgctcaaccctgcggggcgaatcaaaccgtatgcgaaccttgcctcgattctgttacattctccgatgtcgtctctgcgacggaaccctgcaagccatgcacggaatgtgtcgggttgcaaagtatgtcagctccttgcgttgaagcagacgatgcggtgtgtagatgtgcctatgggtattatcaagacgaaacgacgggacggtgtgaagcatgtcgagtatgcgaggcgggcagtggcctcgtcttctcttgtcaggacaagcaaaacactgtctgtgaagaatgccctgatgggacttatagtgatgaggcgaatcacgtcgatccatgtcttccctgtactgtctgtgaagacactgagagacaattgcgagagtgtacgcgatgggccgacgcagagtgcgaggagatcccaggtcgatggataaccaggtcaacccctcctgagggatctgatagtaccgcgccctccacccaagaacccgaagctccacctgagcaagacctcatagcgtccacagtagcaggagttgtcacaaccgtcatgggaagttcacaaccagtagttaccaggggtaccacggataacctcattccggtgtactgcagcattctcgccgctgtggttgtcggacttgttgcatacattgccttcaaacgctggaatagccgcgccaagcgctcgggttcgggtgccaccaacttcagcctgctgaagcaggccggcgacgtggaggagaaccccggcccccagtccgggacacattggagggtattgggcctctgcctcttatcaggtgagtaggatggagtggaaagggtggtgtgtctccagaccgctggaaggcttacagccttacctggcactgcctagtggcaccaaggagcctcatttaccagatgtaaggaactgtttgtgctatgttagggtgagggattagagctggggactaaagaaaaagataggccacgggtgcctgggagagcgttcggggagcaggcaaagaagagcagttggggtgatcatagctattgtgagcagagaggtctctcctctagagtcgacctgcagaggctaggtggaggctcagtgatgataagtctgcgatggtggatgcatgtgtcatggtcatagctgtttcctgtgtgaaattgttatccgctcagagggcacaatcctattccgcgctatccgacaatctccaagacattaggtggagttcagttcggcgtatggcatatgtcgctggaaagaacatgtgagcaaaaggccagcaaaaggccaggaaccgtaaaaaggccgcgttgctggcgtttttccataggctccgcccccctgacgagcatcacaaaaatcgacgctcaagtcagaggtggcgaaacccgacaggactataaagataccaggcgtttccccctggaagctccctcgtgcgctctcctgttccgaccctgccgcttaccggatacctgtccgcctttctcccttcgggaagcgtggcgctttctcatagctcacgctgtaggtatctcagttcggtgtaggtcgttcgctccaagctgggctgtgtgcacgaaccccccgttcagcccgaccgctgcgccttatccggtaactatcgtcttgagtccaacccggtaagacacgacttatcgccactggcagcagccactggtaacaggattagcagagcgaggtatgtaggcggtgctacagagttcttgaagtggtggcctaactacggctacactagaagaacagtatttggtatctgcgctctgctgaagccagttaccttcggaaaaagagttggtagctcttgatccggcaaacaaaccaccgctggtagcggtggtttttttgtttgcaagcagcagattacgcgcagaaaaaaaggatctcaagaagatcctttgatcttttctacggggtctgacgctctattcaacaaagccgccgtcccgtcaagtcagcgtaaatgggtagggggcttcaaatcgtcctcgtgataccaattcggagcctgcttttttgtacaaacttgttgataatggcaattcaaggatcttcacctagatccttttaaattaaaaatgaagttttaaatcaatctaaagtatatatgagtaaacttggtctgacagttaccaatgcttaatcagtgaggcacctatctcagcgatctgtctatttcgttcatccatagttgcctgactccccgtcgtgtagataactacgatacgggagggcttaccatctggccccagtgctgcaatgataccgcgagagccacgctcaccggctccagatttatcagcaataaaccagccagccggaagggccgagcgcagaagtggtcctgcaactttatccgcctccatccagtctattaattgttgccgggaagctagagtaagtagttcgccagttaatagtttgcgcaacgttgttgccattgctacaggcatcgtggtgtcacgctcgtcgtttggtatggcttcattcagctccggttcccaacgatcaaggcgagttacatgatcccccatgttgtgcaaaaaagcggttagctccttcggtcctccgatcgttgtcagaagtaagttggccgcagtgttatcactcatggttatggcagcactgcataattctcttactgtcatgccatccgtaagatgcttttctgtgactggtgagtactcaaccaagtcattctgagaatagtgtatgcggcgaccgagttgctcttgcccggcgtcaatacgggataataccgcgccacatagcagaactttaaaagtgctcatcattggaaaacgttcttcggggcgaaaactctcaaggatcttaccgctgttgagatccagttcgatgtaacccactcgtgcacccaactgatcttcagcatcttttactttcaccagcgtttctgggtgagcaaaaacaggaaggcaaaatgccgcaaaaaagggaataagggcgacacggaaatgttgaatactcatactcttcctttttcaatattattgaagcatttatcagggttattgtctcatgagcggatacatatttgaatgtatttagaaaaataaacaaataggggttccgcgcacatttccccgaaaagtgccagatacctgaaacaaaacccatcgtacggccaaggaagtctccaataactgtgatccaccacaagcgccagggttttcccagtcacgacgttgtaaaacgacggccagtcatgcataatccgcacgcatctggaataaggaagtgccattccgcctgacct

SEQ ID NO: 428 - DNA, 3774 bp, synthetic construct
  source 1..3774: mol_type = other DNA
tcgagctcggtacccggggattaaatgttctattaaaagatctggctttgttaccatggggtaaaagaatgcggtaagtaggaagcataaaagtcagctgtggaacttgactttacagatatgtttcctgagctcattgtacagagtaagcacaaatatgctgattggtaattcccctccttcctgccatgctcatggcagtgggacacaggaaccatgatgttctttctcacctcctctctctgatcctacagctgtggtgactcagcctttctttctttctttctttgtttctttctttctttcagcgtgtgaacagcatgggtgctggtgcaacggggagggctatggatggaccaaggctccttcttcttttgctcttgggcgttagtctgggtggagctaaagaggcatgccccaccggactttacacacattccggtgagtgttgcaaggcctgcaacctgggagaaggcgtcgctcaaccctgcggggcgaatcaaaccgtatgcgaaccttgcctcgattctgttacattctccgatgtcgtctctgcgacggaaccctgcaagccatgcacggaatgtgtcgggttgcaaagtatgtcagctccttgcgttgaagcagacgatgcggtgtgtagatgtgcctatgggtattatcaagacgaaacgacgggacggtgtgaagcatgtcgagtatgcgaggcgggcagtggcctcgtcttctcttgtcaggacaagcaaaacactgtctgtgaagaatgccctgatgggacttatagtgatgaggcgaatcacgtcgatccatgtcttccctgtactgtctgtgaagacactgagagacaattgcgagagtgtacgcgatgggccgacgcagagtgcgaggagatcccaggtcgatggataaccaggtcaacccctcctgagggatctgatagtaccgcgccctccacccaagaacccgaagctccacctgagcaagacctcatagcgtccacagtagcaggagttgtcacaaccgtcatgggaagttcacaaccagtagttaccaggggtaccacggataacctcattccggtgtactgcagcattctcgccgctgtggttgtcggacttgttgcatacattgccttcaaacgctggaatagccgcgccaagcgctcgggttcgggtgccaccaacttcagcctgctgaagcaggccggcgacgtggaggagaaccccggcccctctgtggatgagaagcctgattcgccgatgtacgtgtatgagtccacagtccactgcaccaacatcctcctgggcctcaatgaccagcggaaaaaggatattctctgtgacgtgactttgatcgtggagaggaaggagttccgggcccaccgggctgtgctggccgcatgcagtgaatatttttggcaggcgctggttggacagacaaaaaatgatttggtggtcagcttgcctgaggaggtacagtaatttggtttgtgtgattgttaatgaatgtttattgacttacagaaaactggctcctctagagtcgacctgcagaggctaggtggaggctcagtgatgataagtctgcgatggtggatgcatgtgtcatggtcatagctgtttcctgtgtgaaattgttatccgctcagagggcacaatcctattccgcgctatccgacaatctccaagacattaggtggagttcagttcggcgtatggcatatgtcgctggaaagaacatgtgagcaaaaggccagcaaaaggccaggaaccgtaaaaaggccgcgttgctggcgtttttccataggctccgcccccctgacgagcatcacaaaaatcgacgctcaagtcagaggtggcgaaacccgacaggactataaagataccaggcgtttccccctggaagctccctcgtgcgctctcctgttccgaccctgccgcttaccggatacctgtccgcctttctcccttcgggaagcgtggcgctttctcatagctcacgctgtaggtatctcagttcggtgtaggtcgttcgctccaagctgggctgtgtgcacgaaccccccgttcagcccgaccgctgcgccttatccggtaactatcgtcttgagtccaacccggtaagacacgacttatcgccactggcagcagccactggtaacaggattagcagagcgaggtatgtaggcggtgctacagagttcttgaagtggtggcctaactacggctacactagaagaacagtatttggtatctgcgctctgctgaagccagttaccttcggaaaaagagttggtagctcttgatccggcaaacaaaccaccgctggtagcggtggtttttttgtttgcaagcagcagattacgcgcagaaaaaaaggatctcaagaagatcctttgatcttttctacggggtctgacgctctattcaacaaagccgccgtcccgtcaagtcagcgtaaatgggtagggggcttcaaatcgtcctcgtgataccaattcggagcctgcttttttgtacaaacttgttgataatggcaattcaaggatcttcacctagatccttttaaattaaaaatgaagttttaaatcaatctaaagtatatatgagtaaacttggtctgacagttaccaatgcttaatcagtgaggcacctatctcagcgatctgtctatttcgttcatccatagttgcctgactccccgtcgtgtagataactacgatacgggagggcttaccatctggccccagtgctgcaatgataccgcgagagccacgctcaccggctccagatttatcagcaataaaccagccagccggaagggccgagcgcagaagtggtcctgcaactttatccgcctccatccagtctattaattgttgccgggaagctagagtaagtagttcgccagttaatagtttgcgcaacgttgttgccattgctacaggcatcgtggtgtcacgctcgtcgtttggtatggcttcattcagctccggttcccaacgatcaaggcgagttacatgatcccccatgttgtgcaaaaaagcggttagctccttcggtcctccgatcgttgtcagaagtaagttggccgcagtgttatcactcatggttatggcagcactgcataattctcttactgtcatgccatccgtaagatgcttttctgtgactggtgagtactcaaccaagtcattctgagaatagtgtatgcggcgaccgagttgctcttgcccggcgtcaatacgggataataccgcgccacatagcagaactttaaaagtgctcatcattggaaaacgttcttcggggcgaaaactctcaaggatcttaccgctgttgagatccagttcgatgtaacccactcgtgcacccaactgatcttcagcatcttttactttcaccagcgtttctgggtgagcaaaaacaggaaggcaaaatgccgcaaaaaagggaataagggcgacacggaaatgttgaatactcatactcttcctttttcaatattattgaagcatttatcagggttattgtctcatgagcggatacatatttgaatgtatttagaaaaataaacaaataggggttccgcgcacatttccccgaaaagtgccagatacctgaaacaaaacccatcgtacggccaaggaagtctccaataactgtgatccaccacaagcgccagggttttcccagtcacgacgttgtaaaacgacggccagtcatgcataatccgcacgcatctggaataaggaagtgccattccgcctgacct

SEQ ID NO: 429 - DNA, 3774 bp, synthetic construct
  source 1..3774: mol_type = other DNA
tcgagctcggtacccggggaacacgtctgcatgtgtgtgtgtgcctgtgttgtgtgcctctgcaggggcccgctgcagctgtcctgggtgcctggctgagcaggtgtgctgcccgcactgctgagcccgggatccctccctccctggctgttggcagctgggcccagtgcagctgtgctggcctgaccctaacccaccccctgcagcagggacagggccccagctccttgtcccaggccagctggaggggagcttcatgggtggtcagccccaggggttgggcctgagacggtcaccaagaccgcttccgtccacaggacatgggtgctggtgcaacggggagggctatggatggaccaaggctccttcttcttttgctcttgggcgttagtctgggtggagctaaagaggcatgccccaccggactttacacacattccggtgagtgttgcaaggcctgcaacctgggagaaggcgtcgctcaaccctgcggggcgaatcaaaccgtatgcgaaccttgcctcgattctgttacattctccgatgtcgtctctgcgacggaaccctgcaagccatgcacggaatgtgtcgggttgcaaagtatgtcagctccttgcgttgaagcagacgatgcggtgtgtagatgtgcctatgggtattatcaagacgaaacgacgggacggtgtgaagcatgtcgagtatgcgaggcgggcagtggcctcgtcttctcttgtcaggacaagcaaaacactgtctgtgaagaatgccctgatgggacttatagtgatgaggcgaatcacgtcgatccatgtcttccctgtactgtctgtgaagacactgagagacaattgcgagagtgtacgcgatgggccgacgcagagtgcgaggagatcccaggtcgatggataaccaggtcaacccctcctgagggatctgatagtaccgcgccctccacccaagaacccgaagctccacctgagcaagacctcatagcgtccacagtagcaggagttgtcacaaccgtcatgggaagttcacaaccagtagttaccaggggtaccacggataacctcattccggtgtactgcagcattctcgccgctgtggttgtcggacttgttgcatacattgccttcaaacgctggaatagccgcgccaagcgctcgggttcgggtgccaccaacttcagcctgctgaagcaggccggcgacgtggaggagaaccccggccccctgggcctgcgcccgccactgctcgccctggtggggctgctctccctcgggtgcggtgagttctgtgttccacggaggggactccacgcgtgacattccaatcagggagaacagggcctgccctcactttcccatagacagaagttcccgggaggctggggaaggaccttgccactgggggtaggtcggggactcaggcctcgtctccgcacgtgccaggaggctgtagctgtgctgtttcccgagggcccctctttgcacctgggggtggtggcgaatgcggggtctcctcctggaggctcctctagagtcgacctgcagaggctaggtggaggctcagtgatgataagtctgcgatggtggatgcatgtgtcatggtcatagctgtttcctgtgtgaaattgttatccgctcagagggcacaatcctattccgcgctatccgacaatctccaagacattaggtggagttcagttcggcgtatggcatatgtcgctggaaagaacatgtgagcaaaaggccagcaaaaggccaggaaccgtaaaaaggccgcgttgctggcgtttttccataggctccgcccccctgacgagcatcacaaaaatcgacgctcaagtcagaggtggcgaaacccgacaggactataaagataccaggcgtttccccctggaagctccctcgtgcgctctcctgttccgaccctgccgcttaccggatacctgtccgcctttctcccttcgggaagcgtggcgctttctcatagctcacgctgtaggtatctcagttcggtgtaggtcgttcgctccaagctgggctgtgtgcacgaaccccccgttcagcccgaccgctgcgccttatccggtaactatcgtcttgagtccaacccggtaagacacgacttatcgccactggcagcagccactggtaacaggattagcagagcgaggtatgtaggcggtgctacagagttcttgaagtggtggcctaactacggctacactagaagaacagtatttggtatctgcgctctgctgaagccagttaccttcggaaaaagagttggtagctcttgatccggcaaacaaaccaccgctggtagcggtggtttttttgtttgcaagcagcagattacgcgcagaaaaaaaggatctcaagaagatcctttgatcttttctacggggtctgacgctctattcaacaaagccgccgtcccgtcaagtcagcgtaaatgggtagggggcttcaaatcgtcctcgtgataccaattcggagcctgcttttttgtacaaacttgttgataatggcaattcaaggatcttcacctagatccttttaaattaaaaatgaagttttaaatcaatctaaagtatatatgagtaaacttggtctgacagttaccaatgcttaatcagtgaggcacctatctcagcgatctgtctatttcgttcatccatagttgcctgactccccgtcgtgtagataactacgatacgggagggcttaccatctggccccagtgctgcaatgataccgcgagagccacgctcaccggctccagatttatcagcaataaaccagccagccggaagggccgagcgcagaagtggtcctgcaactttatccgcctccatccagtctattaattgttgccgggaagctagagtaagtagttcgccagttaatagtttgcgcaacgttgttgccattgctacaggcatcgtggtgtcacgctcgtcgtttggtatggcttcattcagctccggttcccaacgatcaaggcgagttacatgatcccccatgttgtgcaaaaaagcggttagctccttcggtcctccgatcgttgtcagaagtaagttggccgcagtgttatcactcatggttatggcagcactgcataattctcttactgtcatgccatccgtaagatgcttttctgtgactggtgagtactcaaccaagtcattctgagaatagtgtatgcggcgaccgagttgctcttgcccggcgtcaatacgggataataccgcgccacatagcagaactttaaaagtgctcatcattggaaaacgttcttcggggcgaaaactctcaaggatcttaccgctgttgagatccagttcgatgtaacccactcgtgcacccaactgatcttcagcatcttttactttcaccagcgtttctgggtgagcaaaaacaggaaggcaaaatgccgcaaaaaagggaataagggcgacacggaaatgttgaatactcatactcttcctttttcaatattattgaagcatttatcagggttattgtctcatgagcggatacatatttgaatgtatttagaaaaataaacaaataggggttccgcgcacatttccccgaaaagtgccagatacctgaaacaaaacccatcgtacggccaaggaagtctccaataactgtgatccaccacaagcgccagggttttcccagtcacgacgttgtaaaacgacggccagtcatgcataatccgcacgcatctggaataaggaagtgccattccgcctgacct

SEQ ID NO: 430 - DNA, 3774 bp, synthetic construct
  source 1..3774: mol_type = other DNA
tcgagctcggtacccggggaatccacaccagggctgtgctagcgtgggcaggcaagccaggtgctggacctctgcacgtggggcatgtgtgggtatgtacatgtacctgtgttcttggtgtgtgtgtgtgtgagtgtgtgtgtgtgtgtctagagctggggtgcaactatggggcccctcgggacatgtcccagccaatgcctgctttgaccagaggagtgtccacgtggctcaggtggtcgagtatctcataccgccctagcacacgtgtgactcctttcccctattgtctacgcagcctgcccttggacaaggacccgatgggtgctggtgcaacggggagggctatggatggaccaaggctccttcttcttttgctcttgggcgttagtctgggtggagctaaagaggcatgccccaccggactttacacacattccggtgagtgttgcaaggcctgcaacctgggagaaggcgtcgctcaaccctgcggggcgaatcaaaccgtatgcgaaccttgcctcgattctgttacattctccgatgtcgtctctgcgacggaaccctgcaagccatgcacggaatgtgtcgggttgcaaagtatgtcagctccttgcgttgaagcagacgatgcggtgtgtagatgtgcctatgggtattatcaagacgaaacgacgggacggtgtgaagcatgtcgagtatgcgaggcgggcagtggcctcgtcttctcttgtcaggacaagcaaaacactgtctgtgaagaatgccctgatgggacttatagtgatgaggcgaatcacgtcgatccatgtcttccctgtactgtctgtgaagacactgagagacaattgcgagagtgtacgcgatgggccgacgcagagtgcgaggagatcccaggtcgatggataaccaggtcaacccctcctgagggatctgatagtaccgcgccctccacccaagaacccgaagctccacctgagcaagacctcatagcgtccacagtagcaggagttgtcacaaccgtcatgggaagttcacaaccagtagttaccaggggtaccacggataacctcattccggtgtactgcagcattctcgccgctgtggttgtcggacttgttgcatacattgccttcaaacgctggaatagccgcgccaagcgctcgggttcgggtgccaccaacttcagcctgctgaagcaggccggcgacgtggaggagaaccccggccccccgaaccctaggcctggcaagccctccgccccttccttggcccttggcccatccccaggagcctcgcccagctggagggctgcacccaaagcctcagacctgctgggggcccggggcccagggggaaccttccagggccgagatcttcgaggcggggcccatgcctcctcttcttccttgaaccccatgccaccatcgcagctgcaggtgaggccctgggcccaggatggggcaggcagggtggggtacctggacctacaggtgccgacctttactgtggcactgggcgggaggggggcttcctctagagtcgacctgcagaggctaggtggaggctcagtgatgataagtctgcgatggtggatgcatgtgtcatggtcatagctgtttcctgtgtgaaattgttatccgctcagagggcacaatcctattccgcgctatccgacaatctccaagacattaggtggagttcagttcggcgtatggcatatgtcgctggaaagaacatgtgagcaaaaggccagcaaaaggccaggaaccgtaaaaaggccgcgttgctggcgtttttccataggctccgcccccctgacgagcatcacaaaaatcgacgctcaagtcagaggtggcgaaacccgacaggactataaagataccaggcgtttccccctggaagctccctcgtgcgctctcctgttccgaccctgccgcttaccggatacctgtccgcctttctcccttcgggaagcgtggcgctttctcatagctcacgctgtaggtatctcagttcggtgtaggtcgttcgctccaagctgggctgtgtgcacgaaccccccgttcagcccgaccgctgcgccttatccggtaactatcgtcttgagtccaacccggtaagacacgacttatcgccactggcagcagccactggtaacaggattagcagagcgaggtatgtaggcggtgctacagagttcttgaagtggtggcctaactacggctacactagaagaacagtatttggtatctgcgctctgctgaagccagttaccttcggaaaaagagttggtagctcttgatccggcaaacaaaccaccgctggtagcggtggtttttttgtttgcaagcagcagattacgcgcagaaaaaaaggatctcaagaagatcctttgatcttttctacggggtctgacgctctattcaacaaagccgccgtcccgtcaagtcagcgtaaatgggtagggggcttcaaatcgtcctcgtgataccaattcggagcctgcttttttgtacaaacttgttgataatggcaattcaaggatcttcacctagatccttttaaattaaaaatgaagttttaaatcaatctaaagtatatatgagtaaacttggtctgacagttaccaatgcttaatcagtgaggcacctatctcagcgatctgtctatttcgttcatccatagttgcctgactccccgtcgtgtagataactacgatacgggagggcttaccatctggccccagtgctgcaatgataccgcgagagccacgctcaccggctccagatttatcagcaataaaccagccagccggaagggccgagcgcagaagtggtcctgcaactttatccgcctccatccagtctattaattgttgccgggaagctagagtaagtagttcgccagttaatagtttgcgcaacgttgttgccattgctacaggcatcgtggtgtcacgctcgtcgtttggtatggcttcattcagctccggttcccaacgatcaaggcgagttacatgatcccccatgttgtgcaaaaaagcggttagctccttcggtcctccgatcgttgtcagaagtaagttggccgcagtgttatcactcatggttatggcagcactgcataattctcttactgtcatgccatccgtaagatgcttttctgtgactggtgagtactcaaccaagtcattctgagaatagtgtatgcggcgaccgagttgctcttgcccggcgtcaatacgggataataccgcgccacatagcagaactttaaaagtgctcatcattggaaaacgttcttcggggcgaaaactctcaaggatcttaccgctgttgagatccagttcgatgtaacccactcgtgcacccaactgatcttcagcatcttttactttcaccagcgtttctgggtgagcaaaaacaggaaggcaaaatgccgcaaaaaagggaataagggcgacacggaaatgttgaatactcatactcttcctttttcaatattattgaagcatttatcagggttattgtctcatgagcggatacatatttgaatgtatttagaaaaataaacaaataggggttccgcgcacatttccccgaaaagtgccagatacctgaaacaaaacccatcgtacggccaaggaagtctccaataactgtgatccaccacaagcgccagggttttcccagtcacgacgttgtaaaacgacggccagtcatgcataatccgcacgcatctggaataaggaagtgccattccgcctgacct

SEQ ID NO: 431 - DNA, 3774 bp, synthetic construct
  source 1..3774: mol_type = other DNA
tcgagctcggtacccggggaccatggggctccttattcacttatttatcttctgtttttgctcacctgcctctttctcttgcttctgctcctactcattccttccttaatccaacctccaattccctctgctattctcctgcctcaagttcactaggctggctgcaagggtcctgagggagaggttgtgtatcgcccctgtatactccaggtccagtaaatgtttgctgactaatgattggcatttccctcaggccctgccatttctgtgggctcaggtccctactggctcaggcccctgcctccgtccgcaaggccacaatgggtgctggtgcaacggggagggctatggatggaccaaggctccttcttcttttgctcttgggcgttagtctgggtggagctaaagaggcatgccccaccggactttacacacattccggtgagtgttgcaaggcctgcaacctgggagaaggcgtcgctcaaccctgcggggcgaatcaaaccgtatgcgaaccttgcctcgattctgttacattctccgatgtcgtctctgcgacggaaccctgcaagccatgcacggaatgtgtcgggttgcaaagtatgtcagctccttgcgttgaagcagacgatgcggtgtgtagatgtgcctatgggtattatcaagacgaaacgacgggacggtgtgaagcatgtcgagtatgcgaggcgggcagtggcctcgtcttctcttgtcaggacaagcaaaacactgtctgtgaagaatgccctgatgggacttatagtgatgaggcgaatcacgtcgatccatgtcttccctgtactgtctgtgaagacactgagagacaattgcgagagtgtacgcgatgggccgacgcagagtgcgaggagatcccaggtcgatggataaccaggtcaacccctcctgagggatctgatagtaccgcgccctccacccaagaacccgaagctccacctgagcaagacctcatagcgtccacagtagcaggagttgtcacaaccgtcatgggaagttcacaaccagtagttaccaggggtaccacggataacctcattccggtgtactgcagcattctcgccgctgtggttgtcggacttgttgcatacattgccttcaaacgctggaatagccgcgccaagcgctcgggttcgggtgccaccaacttcagcctgctgaagcaggccggcgacgtggaggagaaccccggccccaaccgcggagtgccttttaggcacttgcttctggtgctgcaactgggtaagttctcagacctggggtctcaatgcagatgacgtgggaggaaaggcaaaggtggaggatggggtagagggggacagcggcgacattgagacctgactcctttcttttccacttagcgctcctcccagcagccactcagggaaagaaagtggtgctgggcaaaaaaggggatacagtggaactgacctgtacagcttcccagaagaagagcatacaattccactggaaaaactccaaccagataaagattctcctctagagtcgacctgcagaggctaggtggaggctcagtgatgataagtctgcgatggtggatgcatgtgtcatggtcatagctgtttcctgtgtgaaattgttatccgctcagagggcacaatcctattccgcgctatccgacaatctccaagacattaggtggagttcagttcggcgtatggcatatgtcgctggaaagaacatgtgagcaaaaggccagcaaaaggccaggaaccgtaaaaaggccgcgttgctggcgtttttccataggctccgcccccctgacgagcatcacaaaaatcgacgctcaagtcagaggtggcgaaacccgacaggactataaagataccaggcgtttccccctggaagctccctcgtgcgctctcctgttccgaccctgccgcttaccggatacctgtccgcctttctcccttcgggaagcgtggcgctttctcatagctcacgctgtaggtatctcagttcggtgtaggtcgttcgctccaagctgggctgtgtgcacgaaccccccgttcagcccgaccgctgcgccttatccggtaactatcgtcttgagtccaacccggtaagacacgacttatcgccactggcagcagccactggtaacaggattagcagagcgaggtatgtaggcggtgctacagagttcttgaagtggtggcctaactacggctacactagaagaacagtatttggtatctgcgctctgctgaagccagttaccttcggaaaaagagttggtagctcttgatccggcaaacaaaccaccgctggtagcggtggtttttttgtttgcaagcagcagattacgcgcagaaaaaaaggatctcaagaagatcctttgatcttttctacggggtctgacgctctattcaacaaagccgccgtcccgtcaagtcagcgtaaatgggtagggggcttcaaatcgtcctcgtgataccaattcggagcctgcttttttgtacaaacttgttgataatggcaattcaaggatcttcacctagatccttttaaattaaaaatgaagttttaaatcaatctaaagtatatatgagtaaacttggtctgacagttaccaatgcttaatcagtgaggcacctatctcagcgatctgtctatttcgttcatccatagttgcctgactccccgtcgtgtagataactacgatacgggagggcttaccatctggccccagtgctgcaatgataccgcgagagccacgctcaccggctccagatttatcagcaataaaccagccagccggaagggccgagcgcagaagtggtcctgcaactttatccgcctccatccagtctattaattgttgccgggaagctagagtaagtagttcgccagttaatagtttgcgcaacgttgttgccattgctacaggcatcgtggtgtcacgctcgtcgtttggtatggcttcattcagctccggttcccaacgatcaaggcgagttacatgatcccccatgttgtgcaaaaaagcggttagctccttcggtcctccgatcgttgtcagaagtaagttggccgcagtgttatcactcatggttatggcagcactgcataattctcttactgtcatgccatccgtaagatgcttttctgtgactggtgagtactcaaccaagtcattctgagaatagtgtatgcggcgaccgagttgctcttgcccggcgtcaatacgggataataccgcgccacatagcagaactttaaaagtgctcatcattggaaaacgttcttcggggcgaaaactctcaaggatcttaccgctgttgagatccagttcgatgtaacccactcgtgcacccaactgatcttcagcatcttttactttcaccagcgtttctgggtgagcaaaaacaggaaggcaaaatgccgcaaaaaagggaataagggcgacacggaaatgttgaatactcatactcttcctttttcaatattattgaagcatttatcagggttattgtctcatgagcggatacatatttgaatgtatttagaaaaataaacaaataggggttccgcgcacatttccccgaaaagtgccagatacctgaaacaaaacccatcgtacggccaaggaagtctccaataactgtgatccaccacaagcgccagggttttcccagtcacgacgttgtaaaacgacggccagtcatgcataatccgcacgcatctggaataaggaagtgccattccgcctgacct

SEQ ID NO: 432 - DNA, 3774 bp, synthetic construct
  source 1..3774: mol_type = other DNA
tcgagctcggtacccggggataatcagtttgccaatgaggaagccccttatcttcaaaaaaggcaagaaagaaagaaagacttcattttcccccttctctttctgttccagttgaagactaggctttggaggttttcaaagcagacggtgcttggatgggcagggagaagtaacattctgcaaatcgccgtcagaggtcctgaggacacagacctacctggcttgcattccccttgctgaatggcgtgtgctgcagctgcccactgagggctcttttccctgggattctggacttcagagtacgacagcacgctgcgaagatgggtgctggtgcaacggggagggctatggatggaccaaggctccttcttcttttgctcttgggcgttagtctgggtggagctaaagaggcatgccccaccggactttacacacattccggtgagtgttgcaaggcctgcaacctgggagaaggcgtcgctcaaccctgcggggcgaatcaaaccgtatgcgaaccttgcctcgattctgttacattctccgatgtcgtctctgcgacggaaccctgcaagccatgcacggaatgtgtcgggttgcaaagtatgtcagctccttgcgttgaagcagacgatgcggtgtgtagatgtgcctatgggtattatcaagacgaaacgacgggacggtgtgaagcatgtcgagtatgcgaggcgggcagtggcctcgtcttctcttgtcaggacaagcaaaacactgtctgtgaagaatgccctgatgggacttatagtgatgaggcgaatcacgtcgatccatgtcttccctgtactgtctgtgaagacactgagagacaattgcgagagtgtacgcgatgggccgacgcagagtgcgaggagatcccaggtcgatggataaccaggtcaacccctcctgagggatctgatagtaccgcgccctccacccaagaacccgaagctccacctgagcaagacctcatagcgtccacagtagcaggagttgtcacaaccgtcatgggaagttcacaaccagtagttaccaggggtaccacggataacctcattccggtgtactgcagcattctcgccgctgtggttgtcggacttgttgcatacattgccttcaaacgctggaatagccgcgccaagcgctcgggttcgggtgccaccaacttcagcctgctgaagcaggccggcgacgtggaggagaaccccggccccctgagttctatcaagtgcgtgttggtgggcgactctgctgtggggaaaacctctctgttggtgcgcttcacctccgagaccttcccggaggcctacaagcccacagtgtacgagaacacaggggtggacgtcttcatggatggcatccagatcagcctgggcctctgggacacagccggcaatgacgccttcagaagcatccggcccctgtcctaccagcaggcagacgtggtgctgatgtgctactctgtggccaaccataactcattcctgaacttgaagaacaagtggattggtgaatcctctagagtcgacctgcagaggctaggtggaggctcagtgatgataagtctgcgatggtggatgcatgtgtcatggtcatagctgtttcctgtgtgaaattgttatccgctcagagggcacaatcctattccgcgctatccgacaatctccaagacattaggtggagttcagttcggcgtatggcatatgtcgctggaaagaacatgtgagcaaaaggccagcaaaaggccaggaaccgtaaaaaggccgcgttgctggcgtttttccataggctccgcccccctgacgagcatcacaaaaatcgacgctcaagtcagaggtggcgaaacccgacaggactataaagataccaggcgtttccccctggaagctccctcgtgcgctctcctgttccgaccctgccgcttaccggatacctgtccgcctttctcccttcgggaagcgtggcgctttctcatagctcacgctgtaggtatctcagttcggtgtaggtcgttcgctccaagctgggctgtgtgcacgaaccccccgttcagcccgaccgctgcgccttatccggtaactatcgtcttgagtccaacccggtaagacacgacttatcgccactggcagcagccactggtaacaggattagcagagcgaggtatgtaggcggtgctacagagttcttgaagtggtggcctaactacggctacactagaagaacagtatttggtatctgcgctctgctgaagccagttaccttcggaaaaagagttggtagctcttgatccggcaaacaaaccaccgctggtagcggtggtttttttgtttgcaagcagcagattacgcgcagaaaaaaaggatctcaagaagatcctttgatcttttctacggggtctgacgctctattcaacaaagccgccgtcccgtcaagtcagcgtaaatgggtagggggcttcaaatcgtcctcgtgataccaattcggagcctgcttttttgtacaaacttgttgataatggcaattcaaggatcttcacctagatccttttaaattaaaaatgaagttttaaatcaatctaaagtatatatgagtaaacttggtctgacagttaccaatgcttaatcagtgaggcacctatctcagcgatctgtctatttcgttcatccatagttgcctgactccccgtcgtgtagataactacgatacgggagggcttaccatctggccccagtgctgcaatgataccgcgagagccacgctcaccggctccagatttatcagcaataaaccagccagccggaagggccgagcgcagaagtggtcctgcaactttatccgcctccatccagtctattaattgttgccgggaagctagagtaagtagttcgccagttaatagtttgcgcaacgttgttgccattgctacaggcatcgtggtgtcacgctcgtcgtttggtatggcttcattcagctccggttcccaacgatcaaggcgagttacatgatcccccatgttgtgcaaaaaagcggttagctccttcggtcctccgatcgttgtcagaagtaagttggccgcagtgttatcactcatggttatggcagcactgcataattctcttactgtcatgccatccgtaagatgcttttctgtgactggtgagtactcaaccaagtcattctgagaatagtgtatgcggcgaccgagttgctcttgcccggcgtcaatacgggataataccgcgccacatagcagaactttaaaagtgctcatcattggaaaacgttcttcggggcgaaaactctcaaggatcttaccgctgttgagatccagttcgatgtaacccactcgtgcacccaactgatcttcagcatcttttactttcaccagcgtttctgggtgagcaaaaacaggaaggcaaaatgccgcaaaaaagggaataagggcgacacggaaatgttgaatactcatactcttcctttttcaatattattgaagcatttatcagggttattgtctcatgagcggatacatatttgaatgtatttagaaaaataaacaaataggggttccgcgcacatttccccgaaaagtgccagatacctgaaacaaaacccatcgtacggccaaggaagtctccaataactgtgatccaccacaagcgccagggttttcccagtcacgacgttgtaaaacgacggccagtcatgcataatccgcacgcatctggaataaggaagtgccattccgcctgacct

SEQ ID NO: 433 - DNA, 3774 bp, synthetic construct
  source 1..3774: mol_type = other DNA
tcgagctcggtacccggggaaaaattattctaagagaggtagcccatcctaaaaatagctgtaatgcagaagttcatgttcaaccaatcatttttgcttacgatgcaaaaattgaaaactaagtttattagagaggttagagaaggaggagctctaagcagaaaaaatcctgtgccgggaaaccttgattgtggctttttaatgaatgaagaggcctccctgagcttacaatataaaagggggacagagaggtgaaggtctacacatcaggggcttgctcttgcaaaacgaaaccacaagacagacttgcaaaagaaagcatgggtgctggtgcaacggggagggctatggatggaccaaggctccttcttcttttgctcttgggcgttagtctgggtggagctaaagaggcatgccccaccggactttacacacattccggtgagtgttgcaaggcctgcaacctgggagaaggcgtcgctcaaccctgcggggcgaatcaaaccgtatgcgaaccttgcctcgattctgttacattctccgatgtcgtctctgcgacggaaccctgcaagccatgcacggaatgtgtcgggttgcaaagtatgtcagctccttgcgttgaagcagacgatgcggtgtgtagatgtgcctatgggtattatcaagacgaaacgacgggacggtgtgaagcatgtcgagtatgcgaggcgggcagtggcctcgtcttctcttgtcaggacaagcaaaacactgtctgtgaagaatgccctgatgggacttatagtgatgaggcgaatcacgtcgatccatgtcttccctgtactgtctgtgaagacactgagagacaattgcgagagtgtacgcgatgggccgacgcagagtgcgaggagatcccaggtcgatggataaccaggtcaacccctcctgagggatctgatagtaccgcgccctccacccaagaacccgaagctccacctgagcaagacctcatagcgtccacagtagcaggagttgtcacaaccgtcatgggaagttcacaaccagtagttaccaggggtaccacggataacctcattccggtgtactgcagcattctcgccgctgtggttgtcggacttgttgcatacattgccttcaaacgctggaatagccgcgccaagcgctcgggttcgggtgccaccaacttcagcctgctgaagcaggccggcgacgtggaggagaaccccggcccccacagctcagcactgctctgttgtctggttctgctcacaggggtgagggccagcccaggccagggcacccagtctgagaacagctgcacccacttcccaggcaacctgcctaacatgcttcgagatctccgagatgccttcagcagagtgaagactttctttgtgagtatgattccttcctgtcctttctctcttcctgggactgcctgaactagacattctcctggaactataagaaccctcctcctgcgcctccacctccatccccaacacctattcccccaaacttaaattcttaagtcctctagagtcgacctgcagaggctaggtggaggctcagtgatgataagtctgcgatggtggatgcatgtgtcatggtcatagctgtttcctgtgtgaaattgttatccgctcagagggcacaatcctattccgcgctatccgacaatctccaagacattaggtggagttcagttcggcgtatggcatatgtcgctggaaagaacatgtgagcaaaaggccagcaaaaggccaggaaccgtaaaaaggccgcgttgctggcgtttttccataggctccgcccccctgacgagcatcacaaaaatcgacgctcaagtcagaggtggcgaaacccgacaggactataaagataccaggcgtttccccctggaagctccctcgtgcgctctcctgttccgaccctgccgcttaccggatacctgtccgcctttctcccttcgggaagcgtggcgctttctcatagctcacgctgtaggtatctcagttcggtgtaggtcgttcgctccaagctgggctgtgtgcacgaaccccccgttcagcccgaccgctgcgccttatccggtaactatcgtcttgagtccaacccggtaagacacgacttatcgccactggcagcagccactggtaacaggattagcagagcgaggtatgtaggcggtgctacagagttcttgaagtggtggcctaactacggctacactagaagaacagtatttggtatctgcgctctgctgaagccagttaccttcggaaaaagagttggtagctcttgatccggcaaacaaaccaccgctggtagcggtggtttttttgtttgcaagcagcagattacgcgcagaaaaaaaggatctcaagaagatcctttgatcttttctacggggtctgacgctctattcaacaaagccgccgtcccgtcaagtcagcgtaaatgggtagggggcttcaaatcgtcctcgtgataccaattcggagcctgcttttttgtacaaacttgttgataatggcaattcaaggatcttcacctagatccttttaaattaaaaatgaagttttaaatcaatctaaagtatatatgagtaaacttggtctgacagttaccaatgcttaatcagtgaggcacctatctcagcgatctgtctatttcgttcatccatagttgcctgactccccgtcgtgtagataactacgatacgggagggcttaccatctggccccagtgctgcaatgataccgcgagagccacgctcaccggctccagatttatcagcaataaaccagccagccggaagggccgagcgcagaagtggtcctgcaactttatccgcctccatccagtctattaattgttgccgggaagctagagtaagtagttcgccagttaatagtttgcgcaacgttgttgccattgctacaggcatcgtggtgtcacgctcgtcgtttggtatggcttcattcagctccggttcccaacgatcaaggcgagttacatgatcccccatgttgtgcaaaaaagcggttagctccttcggtcctccgatcgttgtcagaagtaagttggccgcagtgttatcactcatggttatggcagcactgcataattctcttactgtcatgccatccgtaagatgcttttctgtgactggtgagtactcaaccaagtcattctgagaatagtgtatgcggcgaccgagttgctcttgcccggcgtcaatacgggataataccgcgccacatagcagaactttaaaagtgctcatcattggaaaacgttcttcggggcgaaaactctcaaggatcttaccgctgttgagatccagttcgatgtaacccactcgtgcacccaactgatcttcagcatcttttactttcaccagcgtttctgggtgagcaaaaacaggaaggcaaaatgccgcaaaaaagggaataagggcgacacggaaatgttgaatactcatactcttcctttttcaatattattgaagcatttatcagggttattgtctcatgagcggatacatatttgaatgtatttagaaaaataaacaaataggggttccgcgcacatttccccgaaaagtgccagatacctgaaacaaaacccatcgtacggccaaggaagtctccaataactgtgatccaccacaagcgccagggttttcccagtcacgacgttgtaaaacgacggccagtcatgcataatccgcacgcatctggaataaggaagtgccattccgcctgacct

SEQ ID NO: 434 - DNA, 3774 bp, synthetic construct
  source 1..3774: mol_type = other DNA
tcgagctcggtacccggggagttccttttctctttcactgagatgagaaaacctatccttcccaatttttttgtgtgagaattaaaatgcagcaagaaaacacacactcataaacacatctgctttggcaaaggagcacatcagaagggctggcttgtgcgcgctcttgctctctgtgtatgtgtattatgttttatgttactgtaaaagatgtaaagagaggcacgtggttaagctctcggggtgtggactccaccagtctcacttcagttccttttgcatgaagagctcagaatcaaaagacgaaacgaacgcctaagatgggtgctggtgcaacggggagggctatggatggaccaaggctccttcttcttttgctcttgggcgttagtctgggtggagctaaagaggcatgccccaccggactttacacacattccggtgagtgttgcaaggcctgcaacctgggagaaggcgtcgctcaaccctgcggggcgaatcaaaccgtatgcgaaccttgcctcgattctgttacattctccgatgtcgtctctgcgacggaaccctgcaagccatgcacggaatgtgtcgggttgcaaagtatgtcagctccttgcgttgaagcagacgatgcggtgtgtagatgtgcctatgggtattatcaagacgaaacgacgggacggtgtgaagcatgtcgagtatgcgaggcgggcagtggcctcgtcttctcttgtcaggacaagcaaaacactgtctgtgaagaatgccctgatgggacttatagtgatgaggcgaatcacgtcgatccatgtcttccctgtactgtctgtgaagacactgagagacaattgcgagagtgtacgcgatgggccgacgcagagtgcgaggagatcccaggtcgatggataaccaggtcaacccctcctgagggatctgatagtaccgcgccctccacccaagaacccgaagctccacctgagcaagacctcatagcgtccacagtagcaggagttgtcacaaccgtcatgggaagttcacaaccagtagttaccaggggtaccacggataacctcattccggtgtactgcagcattctcgccgctgtggttgtcggacttgttgcatacattgccttcaaacgctggaatagccgcgccaagcgctcgggttcgggtgccaccaacttcagcctgctgaagcaggccggcgacgtggaggagaaccccggccccagctttccatgtaaatttgtagccagcttccttctgattttcaatgtttcttccaaaggtaagcataagagtcaaagaagtcccaacccagctttccctgaaagtgactctcagtaactcttttgctttttataggtgcagtctccaaagagattacgaatgccttggaaacctggggtgccttgggtcaggacatcaacttggacattcctagttttcaaatgagtgatgatattgacgatataaaatgggaaaaaacttcagacaagaaaaagattgcacaattcagaaaagagaaagtcctctagagtcgacctgcagaggctaggtggaggctcagtgatgataagtctgcgatggtggatgcatgtgtcatggtcatagctgtttcctgtgtgaaattgttatccgctcagagggcacaatcctattccgcgctatccgacaatctccaagacattaggtggagttcagttcggcgtatggcatatgtcgctggaaagaacatgtgagcaaaaggccagcaaaaggccaggaaccgtaaaaaggccgcgttgctggcgtttttccataggctccgcccccctgacgagcatcacaaaaatcgacgctcaagtcagaggtggcgaaacccgacaggactataaagataccaggcgtttccccctggaagctccctcgtgcgctctcctgttccgaccctgccgcttaccggatacctgtccgcctttctcccttcgggaagcgtggcgctttctcatagctcacgctgtaggtatctcagttcggtgtaggtcgttcgctccaagctgggctgtgtgcacgaaccccccgttcagcccgaccgctgcgccttatccggtaactatcgtcttgagtccaacccggtaagacacgacttatcgccactggcagcagccactggtaacaggattagcagagcgaggtatgtaggcggtgctacagagttcttgaagtggtggcctaactacggctacactagaagaacagtatttggtatctgcgctctgctgaagccagttaccttcggaaaaagagttggtagctcttgatccggcaaacaaaccaccgctggtagcggtggtttttttgtttgcaagcagcagattacgcgcagaaaaaaaggatctcaagaagatcctttgatcttttctacggggtctgacgctctattcaacaaagccgccgtcccgtcaagtcagcgtaaatgggtagggggcttcaaatcgtcctcgtgataccaattcggagcctgcttttttgtacaaacttgttgataatggcaattcaaggatcttcacctagatccttttaaattaaaaatgaagttttaaatcaatctaaagtatatatgagtaaacttggtctgacagttaccaatgcttaatcagtgaggcacctatctcagcgatctgtctatttcgttcatccatagttgcctgactccccgtcgtgtagataactacgatacgggagggcttaccatctggccccagtgctgcaatgataccgcgagagccacgctcaccggctccagatttatcagcaataaaccagccagccggaagggccgagcgcagaagtggtcctgcaactttatccgcctccatccagtctattaattgttgccgggaagctagagtaagtagttcgccagttaatagtttgcgcaacgttgttgccattgctacaggcatcgtggtgtcacgctcgtcgtttggtatggcttcattcagctccggttcccaacgatcaaggcgagttacatgatcccccatgttgtgcaaaaaagcggttagctccttcggtcctccgatcgttgtcagaagtaagttggccgcagtgttatcactcatggttatggcagcactgcataattctcttactgtcatgccatccgtaagatgcttttctgtgactggtgagtactcaaccaagtcattctgagaatagtgtatgcggcgaccgagttgctcttgcccggcgtcaatacgggataataccgcgccacatagcagaactttaaaagtgctcatcattggaaaacgttcttcggggcgaaaactctcaaggatcttaccgctgttgagatccagttcgatgtaacccactcgtgcacccaactgatcttcagcatcttttactttcaccagcgtttctgggtgagcaaaaacaggaaggcaaaatgccgcaaaaaagggaataagggcgacacggaaatgttgaatactcatactcttcctttttcaatattattgaagcatttatcagggttattgtctcatgagcggatacatatttgaatgtatttagaaaaataaacaaataggggttccgcgcacatttccccgaaaagtgccagatacctgaaacaaaacccatcgtacggccaaggaagtctccaataactgtgatccaccacaagcgccagggttttcccagtcacgacgttgtaaaacgacggccagtcatgcataatccgcacgcatctggaataaggaagtgccattccgcctgacct

SEQ ID NO: 435 - DNA, 3774 bp, synthetic construct
  source 1..3774: mol_type = other DNA
tcgagctcggtacccggggagagctgacagcagccccgcagccaccctgcccgaagtctccggaagcggcacgagctcaggccgccgcagccccggcggacccactgttggacctgaggagccagccctcctcccgcacccaaacttggagcacttgacctttggctgttggagggggcaggctcgcgggtggctggacagctgcggagccgcgagggcatcttgcctggagaccgtcggctgcactcccgggctcctggctttgcctctgggatcccgaggtgtcgacatcagacgcatgttgactgagacctagagtcatgggtgctggtgcaacggggagggctatggatggaccaaggctccttcttcttttgctcttgggcgttagtctgggtggagctaaagaggcatgccccaccggactttacacacattccggtgagtgttgcaaggcctgcaacctgggagaaggcgtcgctcaaccctgcggggcgaatcaaaccgtatgcgaaccttgcctcgattctgttacattctccgatgtcgtctctgcgacggaaccctgcaagccatgcacggaatgtgtcgggttgcaaagtatgtcagctccttgcgttgaagcagacgatgcggtgtgtagatgtgcctatgggtattatcaagacgaaacgacgggacggtgtgaagcatgtcgagtatgcgaggcgggcagtggcctcgtcttctcttgtcaggacaagcaaaacactgtctgtgaagaatgccctgatgggacttatagtgatgaggcgaatcacgtcgatccatgtcttccctgtactgtctgtgaagacactgagagacaattgcgagagtgtacgcgatgggccgacgcagagtgcgaggagatcccaggtcgatggataaccaggtcaacccctcctgagggatctgatagtaccgcgccctccacccaagaacccgaagctccacctgagcaagacctcatagcgtccacagtagcaggagttgtcacaaccgtcatgggaagttcacaaccagtagttaccaggggtaccacggataacctcattccggtgtactgcagcattctcgccgctgtggttgtcggacttgttgcatacattgccttcaaacgctggaatagccgcgccaagcgctcgggttcgggtgccaccaacttcagcctgctgaagcaggccggcgacgtggaggagaaccccggccccgatgtatgcgtgcgtcttgctctgtggctcctctggggactcctcctgcaccagggccagagcctcagccatagtcacagtgagaaggcgacaggaaccagctcgggggccaactctgaggagtccactgcagcaggtaaggccttgctgcgggctggactgggctggaggctttggctcaggactgagtggcccgaagtgggcaagttgaaatctaggtttgtacatgtgaggttcatggaggattcacacatggcactgcctgttccaagtagttcaagaagttctttctggtcagtatcctctagagtcgacctgcagaggctaggtggaggctcagtgatgataagtctgcgatggtggatgcatgtgtcatggtcatagctgtttcctgtgtgaaattgttatccgctcagagggcacaatcctattccgcgctatccgacaatctccaagacattaggtggagttcagttcggcgtatggcatatgtcgctggaaagaacatgtgagcaaaaggccagcaaaaggccaggaaccgtaaaaaggccgcgttgctggcgtttttccataggctccgcccccctgacgagcatcacaaaaatcgacgctcaagtcagaggtggcgaaacccgacaggactataaagataccaggcgtttccccctggaagctccctcgtgcgctctcctgttccgaccctgccgcttaccggatacctgtccgcctttctcccttcgggaagcgtggcgctttctcatagctcacgctgtaggtatctcagttcggtgtaggtcgttcgctccaagctgggctgtgtgcacgaaccccccgttcagcccgaccgctgcgccttatccggtaactatcgtcttgagtccaacccggtaagacacgacttatcgccactggcagcagccactggtaacaggattagcagagcgaggtatgtaggcggtgctacagagttcttgaagtggtggcctaactacggctacactagaagaacagtatttggtatctgcgctctgctgaagccagttaccttcggaaaaagagttggtagctcttgatccggcaaacaaaccaccgctggtagcggtggtttttttgtttgcaagcagcagattacgcgcagaaaaaaaggatctcaagaagatcctttgatcttttctacggggtctgacgctctattcaacaaagccgccgtcccgtcaagtcagcgtaaatgggtagggggcttcaaatcgtcctcgtgataccaattcggagcctgcttttttgtacaaacttgttgataatggcaattcaaggatcttcacctagatccttttaaattaaaaatgaagttttaaatcaatctaaagtatatatgagtaaacttggtctgacagttaccaatgcttaatcagtgaggcacctatctcagcgatctgtctatttcgttcatccatagttgcctgactccccgtcgtgtagataactacgatacgggagggcttaccatctggccccagtgctgcaatgataccgcgagagccacgctcaccggctccagatttatcagcaataaaccagccagccggaagggccgagcgcagaagtggtcctgcaactttatccgcctccatccagtctattaattgttgccgggaagctagagtaagtagttcgccagttaatagtttgcgcaacgttgttgccattgctacaggcatcgtggtgtcacgctcgtcgtttggtatggcttcattcagctccggttcccaacgatcaaggcgagttacatgatcccccatgttgtgcaaaaaagcggttagctccttcggtcctccgatcgttgtcagaagtaagttggccgcagtgttatcactcatggttatggcagcactgcataattctcttactgtcatgccatccgtaagatgcttttctgtgactggtgagtactcaaccaagtcattctgagaatagtgtatgcggcgaccgagttgctcttgcccggcgtcaatacgggataataccgcgccacatagcagaactttaaaagtgctcatcattggaaaacgttcttcggggcgaaaactctcaaggatcttaccgctgttgagatccagttcgatgtaacccactcgtgcacccaactgatcttcagcatcttttactttcaccagcgtttctgggtgagcaaaaacaggaaggcaaaatgccgcaaaaaagggaataagggcgacacggaaatgttgaatactcatactcttcctttttcaatattattgaagcatttatcagggttattgtctcatgagcggatacatatttgaatgtatttagaaaaataaacaaataggggttccgcgcacatttccccgaaaagtgccagatacctgaaacaaaacccatcgtacggccaaggaagtctccaataactgtgatccaccacaagcgccagggttttcccagtcacgacgttgtaaaacgacggccagtcatgcataatccgcacgcatctggaataaggaagtgccattccgcctgacct

SEQ ID NO: 436 - DNA, 3774 bp, synthetic construct
  source 1..3774: mol_type = other DNA
tcgagctcggtacccggggatgggtacaggtgtgggtgcttggggaccagttggcgtgcttgggcgtccacataatgtctctggaaagtcagatgggggtttgggacttctcgatctgtgcccagcaggctgcggcttctctccaggttgactctggcacagagcaggctctgcccccttggcgagctcagtctgcggcactgatgccctccacttggcgtctctcgcgccgtctttgggcccaacgcaccaggttcaggaaggccctgacgtgcctccgaccctctgtgaacccgcaggtttcgcgaggcccaggggcgatgggtgctggtgcaacggggagggctatggatggaccaaggctccttcttcttttgctcttgggcgttagtctgggtggagctaaagaggcatgccccaccggactttacacacattccggtgagtgttgcaaggcctgcaacctgggagaaggcgtcgctcaaccctgcggggcgaatcaaaccgtatgcgaaccttgcctcgattctgttacattctccgatgtcgtctctgcgacggaaccctgcaagccatgcacggaatgtgtcgggttgcaaagtatgtcagctccttgcgttgaagcagacgatgcggtgtgtagatgtgcctatgggtattatcaagacgaaacgacgggacggtgtgaagcatgtcgagtatgcgaggcgggcagtggcctcgtcttctcttgtcaggacaagcaaaacactgtctgtgaagaatgccctgatgggacttatagtgatgaggcgaatcacgtcgatccatgtcttccctgtactgtctgtgaagacactgagagacaattgcgagagtgtacgcgatgggccgacgcagagtgcgaggagatcccaggtcgatggataaccaggtcaacccctcctgagggatctgatagtaccgcgccctccacccaagaacccgaagctccacctgagcaagacctcatagcgtccacagtagcaggagttgtcacaaccgtcatgggaagttcacaaccagtagttaccaggggtaccacggataacctcattccggtgtactgcagcattctcgccgctgtggttgtcggacttgttgcatacattgccttcaaacgctggaatagccgcgccaagcgctcgggttcgggtgccaccaacttcagcctgctgaagcaggccggcgacgtggaggagaaccccggccccccagaccccgccgcccatctgccctttttttatgggagcatctcgcgtgccgaggccgaggagcacctgaagctggcgggcatggcggacgggctcttcctgctgcgccagtgcctgcgctcgctgggcggctatgtgctgtcgctcgtgcacgatgtgcgcttccaccactttcccatcgagcgccagctcaacggcacctacgccattgccggcggcaaagcgcactgtggaccggcagagctctgcgagttctactcgcgcgaccccgacgggctgccctgcaacctgcgcaagccgtcctctagagtcgacctgcagaggctaggtggaggctcagtgatgataagtctgcgatggtggatgcatgtgtcatggtcatagctgtttcctgtgtgaaattgttatccgctcagagggcacaatcctattccgcgctatccgacaatctccaagacattaggtggagttcagttcggcgtatggcatatgtcgctggaaagaacatgtgagcaaaaggccagcaaaaggccaggaaccgtaaaaaggccgcgttgctggcgtttttccataggctccgcccccctgacgagcatcacaaaaatcgacgctcaagtcagaggtggcgaaacccgacaggactataaagataccaggcgtttccccctggaagctccctcgtgcgctctcctgttccgaccctgccgcttaccggatacctgtccgcctttctcccttcgggaagcgtggcgctttctcatagctcacgctgtaggtatctcagttcggtgtaggtcgttcgctccaagctgggctgtgtgcacgaaccccccgttcagcccgaccgctgcgccttatccggtaactatcgtcttgagtccaacccggtaagacacgacttatcgccactggcagcagccactggtaacaggattagcagagcgaggtatgtaggcggtgctacagagttcttgaagtggtggcctaactacggctacactagaagaacagtatttggtatctgcgctctgctgaagccagttaccttcggaaaaagagttggtagctcttgatccggcaaacaaaccaccgctggtagcggtggtttttttgtttgcaagcagcagattacgcgcagaaaaaaaggatctcaagaagatcctttgatcttttctacggggtctgacgctctattcaacaaagccgccgtcccgtcaagtcagcgtaaatgggtagggggcttcaaatcgtcctcgtgataccaattcggagcctgcttttttgtacaaacttgttgataatggcaattcaaggatcttcacctagatccttttaaattaaaaatgaagttttaaatcaatctaaagtatatatgagtaaacttggtctgacagttaccaatgcttaatcagtgaggcacctatctcagcgatctgtctatttcgttcatccatagttgcctgactccccgtcgtgtagataactacgatacgggagggcttaccatctggccccagtgctgcaatgataccgcgagagccacgctcaccggctccagatttatcagcaataaaccagccagccggaagggccgagcgcagaagtggtcctgcaactttatccgcctccatccagtctattaattgttgccgggaagctagagtaagtagttcgccagttaatagtttgcgcaacgttgttgccattgctacaggcatcgtggtgtcacgctcgtcgtttggtatggcttcattcagctccggttcccaacgatcaaggcgagttacatgatcccccatgttgtgcaaaaaagcggttagctccttcggtcctccgatcgttgtcagaagtaagttggccgcagtgttatcactcatggttatggcagcactgcataattctcttactgtcatgccatccgtaagatgcttttctgtgactggtgagtactcaaccaagtcattctgagaatagtgtatgcggcgaccgagttgctcttgcccggcgtcaatacgggataataccgcgccacatagcagaactttaaaagtgctcatcattggaaaacgttcttcggggcgaaaactctcaaggatcttaccgctgttgagatccagttcgatgtaacccactcgtgcacccaactgatcttcagcatcttttactttcaccagcgtttctgggtgagcaaaaacaggaaggcaaaatgccgcaaaaaagggaataagggcgacacggaaatgttgaatactcatactcttcctttttcaatattattgaagcatttatcagggttattgtctcatgagcggatacatatttgaatgtatttagaaaaataaacaaataggggttccgcgcacatttccccgaaaagtgccagatacctgaaacaaaacccatcgtacggccaaggaagtctccaataactgtgatccaccacaagcgccagggttttcccagtcacgacgttgtaaaacgacggccagtcatgcataatccgcacgcatctggaataaggaagtgccattccgcctgacct

SEQ ID NO: 437 - DNA, 3774 bp, synthetic construct
  source 1..3774: mol_type = other DNA
tcgagctcggtacccggggacatggccttgtcctgtgtgggggtggccgagagcactgccccagccctgggtaccttgggcaggaagctggcagaggccagggctgccattcaaacaggggcaggtggttttgccaggaggaagttgacagttcaacttcaaacatgggtgacgcaggccccacactgcctgctccccgtcccacccctccctgagcacgccaccccgccctctccctctctgagagcgagatacccggccagacaccctcacctgcggtgcccagctgcgcaggctgaggcaagagaacgccagaaaccatgggtgctggtgcaacggggagggctatggatggaccaaggctccttcttcttttgctcttgggcgttagtctgggtggagctaaagaggcatgccccaccggactttacacacattccggtgagtgttgcaaggcctgcaacctgggagaaggcgtcgctcaaccctgcggggcgaatcaaaccgtatgcgaaccttgcctcgattctgttacattctccgatgtcgtctctgcgacggaaccctgcaagccatgcacggaatgtgtcgggttgcaaagtatgtcagctccttgcgttgaagcagacgatgcggtgtgtagatgtgcctatgggtattatcaagacgaaacgacgggacggtgtgaagcatgtcgagtatgcgaggcgggcagtggcctcgtcttctcttgtcaggacaagcaaaacactgtctgtgaagaatgccctgatgggacttatagtgatgaggcgaatcacgtcgatccatgtcttccctgtactgtctgtgaagacactgagagacaattgcgagagtgtacgcgatgggccgacgcagagtgcgaggagatcccaggtcgatggataaccaggtcaacccctcctgagggatctgatagtaccgcgccctccacccaagaacccgaagctccacctgagcaagacctcatagcgtccacagtagcaggagttgtcacaaccgtcatgggaagttcacaaccagtagttaccaggggtaccacggataacctcattccggtgtactgcagcattctcgccgctgtggttgtcggacttgttgcatacattgccttcaaacgctggaatagccgcgccaagcgctcgggttcgggtgccaccaacttcagcctgctgaagcaggccggcgacgtggaggagaaccccggcccccccatggggtctctgcaaccgctcgcgacgttatacctgctggggatgctgggtgagtacccctcccaggtgtcctgcgaacacccgggctcgctccagtgcaaggaaggagttcccagttttacccaaggctgactctgggatccacatgtcagccctctggagcgttgtggagatttggggccactgggatccctgcctgcccccactaagccgcagcttggccctctgtcctgcatgtcccacccgccaggagcacaaccttgcctctctcatgcgctgttgagaaccctgctttactcctctagagtcgacctgcagaggctaggtggaggctcagtgatgataagtctgcgatggtggatgcatgtgtcatggtcatagctgtttcctgtgtgaaattgttatccgctcagagggcacaatcctattccgcgctatccgacaatctccaagacattaggtggagttcagttcggcgtatggcatatgtcgctggaaagaacatgtgagcaaaaggccagcaaaaggccaggaaccgtaaaaaggccgcgttgctggcgtttttccataggctccgcccccctgacgagcatcacaaaaatcgacgctcaagtcagaggtggcgaaacccgacaggactataaagataccaggcgtttccccctggaagctccctcgtgcgctctcctgttccgaccctgccgcttaccggatacctgtccgcctttctcccttcgggaagcgtggcgctttctcatagctcacgctgtaggtatctcagttcggtgtaggtcgttcgctccaagctgggctgtgtgcacgaaccccccgttcagcccgaccgctgcgccttatccggtaactatcgtcttgagtccaacccggtaagacacgacttatcgccactggcagcagccactggtaacaggattagcagagcgaggtatgtaggcggtgctacagagttcttgaagtggtggcctaactacggctacactagaagaacagtatttggtatctgcgctctgctgaagccagttaccttcggaaaaagagttggtagctcttgatccggcaaacaaaccaccgctggtagcggtggtttttttgtttgcaagcagcagattacgcgcagaaaaaaaggatctcaagaagatcctttgatcttttctacggggtctgacgctctattcaacaaagccgccgtcccgtcaagtcagcgtaaatgggtagggggcttcaaatcgtcctcgtgataccaattcggagcctgcttttttgtacaaacttgttgataatggcaattcaaggatcttcacctagatccttttaaattaaaaatgaagttttaaatcaatctaaagtatatatgagtaaacttggtctgacagttaccaatgcttaatcagtgaggcacctatctcagcgatctgtctatttcgttcatccatagttgcctgactccccgtcgtgtagataactacgatacgggagggcttaccatctggccccagtgctgcaatgataccgcgagagccacgctcaccggctccagatttatcagcaataaaccagccagccggaagggccgagcgcagaagtggtcctgcaactttatccgcctccatccagtctattaattgttgccgggaagctagagtaagtagttcgccagttaatagtttgcgcaacgttgttgccattgctacaggcatcgtggtgtcacgctcgtcgtttggtatggcttcattcagctccggttcccaacgatcaaggcgagttacatgatcccccatgttgtgcaaaaaagcggttagctccttcggtcctccgatcgttgtcagaagtaagttggccgcagtgttatcactcatggttatggcagcactgcataattctcttactgtcatgccatccgtaagatgcttttctgtgactggtgagtactcaaccaagtcattctgagaatagtgtatgcggcgaccgagttgctcttgcccggcgtcaatacgggataataccgcgccacatagcagaactttaaaagtgctcatcattggaaaacgttcttcggggcgaaaactctcaaggatcttaccgctgttgagatccagttcgatgtaacccactcgtgcacccaactgatcttcagcatcttttactttcaccagcgtttctgggtgagcaaaaacaggaaggcaaaatgccgcaaaaaagggaataagggcgacacggaaatgttgaatactcatactcttcctttttcaatattattgaagcatttatcagggttattgtctcatgagcggatacatatttgaatgtatttagaaaaataaacaaataggggttccgcgcacatttccccgaaaagtgccagatacctgaaacaaaacccatcgtacggccaaggaagtctccaataactgtgatccaccacaagcgccagggttttcccagtcacgacgttgtaaaacgacggccagtcatgcataatccgcacgcatctggaataaggaagtgccattccgcctgacct

SEQ ID NO: 438 - DNA, 3774 bp, synthetic construct
  source 1..3774: mol_type = other DNA
tcgagctcggtacccggggatcaagaaaaataaagcaatggaaggggttccggaaataatgggttgttgagagtagggggatggcaagattaaaatgttaaatagcatgtcaaaggaaggtttcattgaggaagtgacatttgagtacagatctgaagaggttaaggaataaactgtgtatattctagagggaagactgttccagagagaaggagtcttttccttttccagggtcccttttcagatggctaagtttgttggaacatttacgattgggtaggtattactgtagatttactcacgctttctgccttgacagaatgggtgctggtgcaacggggagggctatggatggaccaaggctccttcttcttttgctcttgggcgttagtctgggtggagctaaagaggcatgccccaccggactttacacacattccggtgagtgttgcaaggcctgcaacctgggagaaggcgtcgctcaaccctgcggggcgaatcaaaccgtatgcgaaccttgcctcgattctgttacattctccgatgtcgtctctgcgacggaaccctgcaagccatgcacggaatgtgtcgggttgcaaagtatgtcagctccttgcgttgaagcagacgatgcggtgtgtagatgtgcctatgggtattatcaagacgaaacgacgggacggtgtgaagcatgtcgagtatgcgaggcgggcagtggcctcgtcttctcttgtcaggacaagcaaaacactgtctgtgaagaatgccctgatgggacttatagtgatgaggcgaatcacgtcgatccatgtcttccctgtactgtctgtgaagacactgagagacaattgcgagagtgtacgcgatgggccgacgcagagtgcgaggagatcccaggtcgatggataaccaggtcaacccctcctgagggatctgatagtaccgcgccctccacccaagaacccgaagctccacctgagcaagacctcatagcgtccacagtagcaggagttgtcacaaccgtcatgggaagttcacaaccagtagttaccaggggtaccacggataacctcattccggtgtactgcagcattctcgccgctgtggttgtcggacttgttgcatacattgccttcaaacgctggaatagccgcgccaagcgctcgggttcgggtgccaccaacttcagcctgctgaagcaggccggcgacgtggaggagaaccccggcccctctagcaaggaagtgaagactgctctaaaaagtgctagagatgcaatcagaaacaaagaatacaaagaagctttgaaacactgtaaggtaaccagtatttttttcttccacaatgaaagtatgttacccatttataaacattgttgatttgtaatatgtgaattatttcctgtccaaacagcaaaagtggtaaggccatttagtagaaccattagaatggttggacttttaacctctagttagcaggataaactacctctgccaaacttaactttctctgtattggtaacttaacaaaactcctctagagtcgacctgcagaggctaggtggaggctcagtgatgataagtctgcgatggtggatgcatgtgtcatggtcatagctgtttcctgtgtgaaattgttatccgctcagagggcacaatcctattccgcgctatccgacaatctccaagacattaggtggagttcagttcggcgtatggcatatgtcgctggaaagaacatgtgagcaaaaggccagcaaaaggccaggaaccgtaaaaaggccgcgttgctggcgtttttccataggctccgcccccctgacgagcatcacaaaaatcgacgctcaagtcagaggtggcgaaacccgacaggactataaagataccaggcgtttccccctggaagctccctcgtgcgctctcctgttccgaccctgccgcttaccggatacctgtccgcctttctcccttcgggaagcgtggcgctttctcatagctcacgctgtaggtatctcagttcggtgtaggtcgttcgctccaagctgggctgtgtgcacgaaccccccgttcagcccgaccgctgcgccttatccggtaactatcgtcttgagtccaacccggtaagacacgacttatcgccactggcagcagccactggtaacaggattagcagagcgaggtatgtaggcggtgctacagagttcttgaagtggtggcctaactacggctacactagaagaacagtatttggtatctgcgctctgctgaagccagttaccttcggaaaaagagttggtagctcttgatccggcaaacaaaccaccgctggtagcggtggtttttttgtttgcaagcagcagattacgcgcagaaaaaaaggatctcaagaagatcctttgatcttttctacggggtctgacgctctattcaacaaagccgccgtcccgtcaagtcagcgtaaatgggtagggggcttcaaatcgtcctcgtgataccaattcggagcctgcttttttgtacaaacttgttgataatggcaattcaaggatcttcacctagatccttttaaattaaaaatgaagttttaaatcaatctaaagtatatatgagtaaacttggtctgacagttaccaatgcttaatcagtgaggcacctatctcagcgatctgtctatttcgttcatccatagttgcctgactccccgtcgtgtagataactacgatacgggagggcttaccatctggccccagtgctgcaatgataccgcgagagccacgctcaccggctccagatttatcagcaataaaccagccagccggaagggccgagcgcagaagtggtcctgcaactttatccgcctccatccagtctattaattgttgccgggaagctagagtaagtagttcgccagttaatagtttgcgcaacgttgttgccattgctacaggcatcgtggtgtcacgctcgtcgtttggtatggcttcattcagctccggttcccaacgatcaaggcgagttacatgatcccccatgttgtgcaaaaaagcggttagctccttcggtcctccgatcgttgtcagaagtaagttggccgcagtgttatcactcatggttatggcagcactgcataattctcttactgtcatgccatccgtaagatgcttttctgtgactggtgagtactcaaccaagtcattctgagaatagtgtatgcggcgaccgagttgctcttgcccggcgtcaatacgggataataccgcgccacatagcagaactttaaaagtgctcatcattggaaaacgttcttcggggcgaaaactctcaaggatcttaccgctgttgagatccagttcgatgtaacccactcgtgcacccaactgatcttcagcatcttttactttcaccagcgtttctgggtgagcaaaaacaggaaggcaaaatgccgcaaaaaagggaataagggcgacacggaaatgttgaatactcatactcttcctttttcaatattattgaagcatttatcagggttattgtctcatgagcggatacatatttgaatgtatttagaaaaataaacaaataggggttccgcgcacatttccccgaaaagtgccagatacctgaaacaaaacccatcgtacggccaaggaagtctccaataactgtgatccaccacaagcgccagggttttcccagtcacgacgttgtaaaacgacggccagtcatgcataatccgcacgcatctggaataaggaagtgccattccgcctgacct

SEQ ID NO: 439 - DNA, 6189 bp, synthetic construct
  source 1..6189: mol_type = other DNA
tcgcgcgtttcggtgatgacggtgaaaacctctgacacatgcagctcccggagacggtcacagcttgtctgtaagcggatgccgggagcagacaagcccgtcagggcgcgtcagcgggtgttggcgggtgtcggggctggcttaactatgcggcatcagagcagattgtactgagagtgcaccatatgcggtgtgaaataccgcacagatgcgtaaggagaaaataccgcatcaggcgccattcgccattcaggctgcgcaactgttgggaagggcgatcggtgcgggcctcttcgctattacgccagctggcgaaagggggatgtgctgcaaggcgattaagttgggtaacgccagggttttcccagtcacgacgttgtaaaacgacggccagtgcacagtgctaaggatgctcagagggcatctctgataggcagaggtgagggttagggaaggaagctgtagtctagctagctagagctgctggaatagacatgacaatggctgctgccaaactgttttctcttctgaggacagatgtcccgtgcaagtggcttggtggaagggactagtgtctctaatatagggtgatttataagcaggaaagtgtgtcctagaaattcagaccagagtgatagattggaattggatcatgggggactcattgaatgttatttattgtatttgtttttgcgatcagtgttagtaaagtgtcaaagggattgagcagatgagtgacatcatgcaacacaagttttgagtttcacttgtcagactgactggagaggggcctggttagttacaggaaggtaatttggcatgcagccactatttttgagttgatgcaagcctctctgtatggagagctggtctcctttatcctgtgggaaaagagaacaaaggagcatgggagtgttcaagggaaggagaaataaagggcagagaggcagcggtggtgtcaggggaagcccacaggagttaacagcagggttgcctcaacctagagaggaagcgacctggtgccctcggctctgtggcttccttcatctaacaacatcttccactctacaacaatgccagggaaggcggaggctggtacagtgcatcaagacacagctactcctgggtgacagaggttcagggccagctcactaagtaggcagaagtttttgacatatactttgagagataaagcaagattctgtacctcaaccttcagaatttcccctaccactcattatagttccggagctatatagctcctatcattctatcataaccttagaataccagagaacatatcatctcatctaattatctcttactatatgtgaaaaaaatgaaggacatgggggaagtgtgacttgccccaaatcacatatttcatggtagagggctgggcttggccatgaaggagcatgagttcactgagttccctttggcttttccatgctagcaatgcacgtggcccagcctgctgtggtactggccagcagccgaggcatcgccagctttgtgtgtgagtatgcatctccaggcaaagccactgaggtccgggtgacagtgcttcggcaggctgacagccaggtgactgaagtctgtgcggcaacctacatgatggggaatgagttgaccttcctagatgattccatctgcacgggcacctccagtggaaatcaagtgaacctcactatccaaggactgagggccatggacacgggactctacatctgcaaggtggagctcatgtacccaccgccatactacctgggcataggcaacggaacccagatttatgtaattgatccagaaccgtgcccagattctgacttcctcctctggatccttgcagcagttagttcggggttgtttttttatagctttctcctcacagctgtttctttgagcaaaatgctaaagaaaagaagccctcttacaacaggggtctatgtgaaaatgcccccaacagagccagaatgtgaaaagcaatttcagccttattttattcccatcaatggatctggaggaactagcggcagcaagggcgaggagctgttcaccggggtggtgcccatcctggtcgagctggacggcgacgtaaacggccacaagttcagcgtgcgcggcgagggcgagggcgatgccaccaacggcaagctgaccctgaagttcatctgcaccaccggcaagctgcccgtgccctggcccaccctcgtgaccaccctgacctacggcgtgcagtgcttcagccgctaccccgaccacatgaagcgccacgacttcttcaagtccgccatgcccgaaggctacgtccaggagcgcaccatcagcttcaaggacgacggcacctacaagacccgcgccgaggtgaagttcgagggcgacaccctggtgaaccgcatcgagctgaagggcatcgacttcaaggaggacggcaacatcctggggcacaagctggagtacaacttcaacagccacaacgtctatatcaccgccgacaagcagaagaacggcatcaaggccaacttcaagatccgccacaacgtggaggacggcagcgtgcagctcgccgaccactaccagcagaacacccccatcggcgacggccccgtgctgctgcccgacaaccactacctgagcacccagtccgtgctgagcaaagaccccaacgagaagcgcgatcacatggtcctgctggagttcgtgaccgccgccgggatcacttgacaccgggtcttcaacttgtttattgcagcttataatggttacaaataaagcaatagcatcacaaatttcacaaataaagcatttttttcactgcattctagttgtggtttgtccaaactcatcaatgtatcttatcatgtctggaagacctgtttacctcttctgtttgtcatatcagtgttcttcctgccacaaccatcttgaagaatctatttctcagtaagaaaatatctttatggagagtagctggaaaacagttgagagatggaggggaggctgggggtgtggagaggggaaggggtaagtgatagattcgttgaaggggggagaaaaggccgtggggatgaagctagaaggcagaagggcttgcctgggcttggccatgaaggagcatgagttcactgagttccctttggcttttccatgctaccaatgcacgtggcccagcctgctgtggtactggccagcagccgaggcatcgccagctttgtgtgtgagtatgcatctccaggcaaagccactgaggtccgggtgacagtgcttcggcaggctgacagccaggtgactgaagtctgtgcggcaacctacatgatggggaatgagttgaccttcctagatgattccatctgcacgggcacctccagtggaaatcaagtgaacctcactatccaaggactgagggccatggacacgggactctacatctgcaaggtggagctcatgtacccaccgccatactacctgggcataggcaacggaacccagatttatgtaattggtgagcaaagccatttcactgagttgacacctgttgcattgcagtcatctatgcacaaaaacagttttgttccttaatttcaggaggtttacttttaggactgtggacattctctttaagagttctgtaccacatggtagccttgcttattgtgggtggcaaccttaatagcattctgactgtaaaataaaatgatttggggaagttggggctctcgctctggagtgctaaccatcatgacgtttgatctgtacttttgatatgatatgatgctcctggggaagtagtcccaaatagccaaacctattggtgggctacccatgcaatttaggggtggacctcaaggcctggaagctctaatgtccttttttcaccaatgttggggagtagagccctagcgagctcggtacccggggatcctctagagtcgacctgcaggcatgcaagcttggcgtaatcatggtcatagctgtttcctgtgtgaaattgttatccgctcacaattccacacaacatacgagccggaagcataaagtgtaaagcctggggtgcctaatgagtgagctaactcacattaattgcgttgcgctcactgcccgctttccagtcgggaaacctgtcgtgccagctgcattaatgaatcggccaacgcgcggggagaggcggtttgcgtattgggcgctcttccgcttcctcgctcactgactcgctgcgctcggtcgttcggctgcggcgagcggtatcagctcactcaaaggcggtaatacggttatccacagaatcaggggataacgcaggaaagaacatgtgagcaaaaggccagcaaaaggccaggaaccgtaaaaaggccgcgttgctggcgtttttccataggctccgcccccctgacgagcatcacaaaaatcgacgctcaagtcagaggtggcgaaacccgacaggactataaagataccaggcgtttccccctggaagctccctcgtgcgctctcctgttccgaccctgccgcttaccggatacctgtccgcctttctcccttcgggaagcgtggcgctttctcatagctcacgctgtaggtatctcagttcggtgtaggtcgttcgctccaagctgggctgtgtgcacgaaccccccgttcagcccgaccgctgcgccttatccggtaactatcgtcttgagtccaacccggtaagacacgacttatcgccactggcagcagccactggtaacaggattagcagagcgaggtatgtaggcggtgctacagagttcttgaagtggtggcctaactacggctacactagaaggacagtatttggtatctgcgctctgctgaagccagttaccttcggaaaaagagttggtagctcttgatccggcaaacaaaccaccgctggtagcggtggtttttttgtttgcaagcagcagattacgcgcagaaaaaaaggatctcaagaagatcctttgatcttttctacggggtctgacgctcagtggaacgaaaactcacgttaagggattttggtcatgagattatcaaaaaggatcttcacctagatccttttaaattaaaaatgaagttttaaatcaatctaaagtatatatgagtaaacttggtctgacagttaccaatgcttaatcagtgaggcacctatctcagcgatctgtctatttcgttcatccatagttgcctgactccccgtcgtgtagataactacgatacgggagggcttaccatctggccccagtgctgcaatgataccgcgagacccacgctcaccggctccagatttatcagcaataaaccagccagccggaagggccgagcgcagaagtggtcctgcaactttatccgcctccatccagtctattaattgttgccgggaagctagagtaagtagttcgccagttaatagtttgcgcaacgttgttgccattgctacaggcatcgtggtgtcacgctcgtcgtttggtatggcttcattcagctccggttcccaacgatcaaggcgagttacatgatcccccatgttgtgcaaaaaagcggttagctccttcggtcctccgatcgttgtcagaagtaagttggccgcagtgttatcactcatggttatggcagcactgcataattctcttactgtcatgccatccgtaagatgcttttctgtgactggtgagtactcaaccaagtcattctgagaatagtgtatgcggcgaccgagttgctcttgcccggcgtcaatacgggataataccgcgccacatagcagaactttaaaagtgctcatcattggaaaacgttcttcggggcgaaaactctcaaggatcttaccgctgttgagatccagttcgatgtaacccactcgtgcacccaactgatcttcagcatcttttactttcaccagcgtttctgggtgagcaaaaacaggaaggcaaaatgccgcaaaaaagggaataagggcgacacggaaatgttgaatactcatactcttcctttttcaatattattgaagcatttatcagggttattgtctcatgagcggatacatatttgaatgtatttagaaaaataaacaaataggggttccgcgcacatttccccgaaaagtgccacctgacgtctaagaaaccattattatcatgacattaacctataaaaataggcgtatcacgaggccctttcgtc

SEQ ID NO: 440 - DNA, 6189 bp, synthetic construct
  source 1..6189: mol_type = other DNA
tcgcgcgtttcggtgatgacggtgaaaacctctgacacatgcagctcccggagacggtcacagcttgtctgtaagcggatgccgggagcagacaagcccgtcagggcgcgtcagcgggtgttggcgggtgtcggggctggcttaactatgcggcatcagagcagattgtactgagagtgcaccatatgcggtgtgaaataccgcacagatgcgtaaggagaaaataccgcatcaggcgccattcgccattcaggctgcgcaactgttgggaagggcgatcggtgcgggcctcttcgctattacgccagctggcgaaagggggatgtgctgcaaggcgattaagttgggtaacgccagggttttcccagtcacgacgttgtaaaacgacggccagtgcacagtgctaaggatgctcagagggcatctctgataggcagaggtgagggttagggaaggaagctgtagtctagctagctagagctgctggaatagacatgacaatggctgctgccaaactgttttctcttctgaggacagatgtcccgtgcaagtggcttggtggaagggactagtgtctctaatatagggtgatttataagcaggaaagtgtgtcctagaaattcagaccagagtgatagattggaattggatcatgggggactcattgaatgttatttattgtatttgtttttgcgatcagtgttagtaaagtgtcaaagggattgagcagatgagtgacatcatgcaacacaagttttgagtttcacttgtcagactgactggagaggggcctggttagttacaggaaggtaatttggcatgcagccactatttttgagttgatgcaagcctctctgtatggagagctggtctcctttatcctgtgggaaaagagaacaaaggagcatgggagtgttcaagggaaggagaaataaagggcagagaggcagcggtggtgtcaggggaagcccacaggagttaacagcagggttgcctcaacctagagaggaagcgacctggtgccctcggctctgtggcttccttcatctaacaacatcttccactctacaacaatgccagggaaggcggaggctggtacagtgcatcaagacacagctactcctgggtgacagaggttcagggccagctcactaagtaggcagaagtttttgacatatactttgagagataaagcaagattctgtacctcaaccttcagaatttcccctaccactcattatagttccggagctatatagctcctatcattctatcataaccttagaataccagagaacatatcatctcatctaattatctcttactatatgtgaaaaaaatgaaggacatgggggaagtgtgacttgccccaaatcacatatttcatggtagagggctgggcttggccatgaaggagcatgagttcactgagttccctttggcttttccatgctagcaatgcacgtggcccagcctgctgtggtactggccagcagccgaggcatcgccagctttgtgtgtgagtatgcatctccaggcaaagccactgaggtctgggtgacagtgcttcggcaggctgacagccaggtgactgaagtctgtgcggcaacctacatgatggggaatgagttgaccttcctagatgattccatctgcacgggcacctccagtggaaatcaagtgaacctcactatccaaggactgagggccatggacacgggactctacatctgcaaggtggagctcatgtacccaccgccatactacctgggcataggcaacggaacccagatttatgtaattgatccagaaccgtgcccagattctgacttcctcctctggatccttgcagcagttagttcggggttgtttttttatagctttctcctcacagctgtttctttgagcaaaatgctaaagaaaagaagccctcttacaacaggggtctatgtgaaaatgcccccaacagagccagaatgtgaaaagcaatttcagccttattttattcccatcaatggatctggaggaactagcggcagcaagggcgaggagctgttcaccggggtggtgcccatcctggtcgagctggacggcgacgtaaacggccacaagttcagcgtgcgcggcgagggcgagggcgatgccaccaacggcaagctgaccctgaagttcatctgcaccaccggcaagctgcccgtgccctggcccaccctcgtgaccaccctgacctacggcgtgcagtgcttcagccgctaccccgaccacatgaagcgccacgacttcttcaagtccgccatgcccgaaggctacgtccaggagcgcaccatcagcttcaaggacgacggcacctacaagacccgcgccgaggtgaagttcgagggcgacaccctggtgaaccgcatcgagctgaagggcatcgacttcaaggaggacggcaacatcctggggcacaagctggagtacaacttcaacagccacaacgtctatatcaccgccgacaagcagaagaacggcatcaaggccaacttcaagatccgccacaacgtggaggacggcagcgtgcagctcgccgaccactaccagcagaacacccccatcggcgacggccccgtgctgctgcccgacaaccactacctgagcacccagtccgtgctgagcaaagaccccaacgagaagcgcgatcacatggtcctgctggagttcgtgaccgccgccgggatcacttgacaccgggtcttcaacttgtttattgcagcttataatggttacaaataaagcaatagcatcacaaatttcacaaataaagcatttttttcactgcattctagttgtggtttgtccaaactcatcaatgtatcttatcatgtctggaagacctgtttacctcttctgtttgtcatatcagtgttcttcctgccacaaccatcttgaagaatctatttctcagtaagaaaatatctttatggagagtagctggaaaacagttgagagatggaggggaggctgggggtgtggagaggggaaggggtaagtgatagattcgttgaaggggggagaaaaggccgtggggatgaagctagaaggcagaagggcttgcctgggcttggccatgaaggagcatgagttcactgagttccctttggcttttccatgctaccaatgcacgtggcccagcctgctgtggtactggccagcagccgaggcatcgccagctttgtgtgtgagtatgcatctccaggcaaagccactgaggtccgggtgacagtgcttcggcaggctgacagccaggtgactgaagtctgtgcggcaacctacatgatggggaatgagttgaccttcctagatgattccatctgcacgggcacctccagtggaaatcaagtgaacctcactatccaaggactgagggccatggacacgggactctacatctgcaaggtggagctcatgtacccaccgccatactacctgggcataggcaacggaacccagatttatgtaattggtgagcaaagccatttcactgagttgacacctgttgcattgcagtcatctatgcacaaaaacagttttgttccttaatttcaggaggtttacttttaggactgtggacattctctttaagagttctgtaccacatggtagccttgcttattgtgggtggcaaccttaatagcattctgactgtaaaataaaatgatttggggaagttggggctctcgctctggagtgctaaccatcatgacgtttgatctgtacttttgatatgatatgatgctcctggggaagtagtcccaaatagccaaacctattggtgggctacccatgcaatttaggggtggacctcaaggcctggaagctctaatgtccttttttcaccaatgttggggagtagagccctagcgagctcggtacccggggatcctctagagtcgacctgcaggcatgcaagcttggcgtaatcatggtcatagctgtttcctgtgtgaaattgttatccgctcacaattccacacaacatacgagccggaagcataaagtgtaaagcctggggtgcctaatgagtgagctaactcacattaattgcgttgcgctcactgcccgctttccagtcgggaaacctgtcgtgccagctgcattaatgaatcggccaacgcgcggggagaggcggtttgcgtattgggcgctcttccgcttcctcgctcactgactcgctgcgctcggtcgttcggctgcggcgagcggtatcagctcactcaaaggcggtaatacggttatccacagaatcaggggataacgcaggaaagaacatgtgagcaaaaggccagcaaaaggccaggaaccgtaaaaaggccgcgttgctggcgtttttccataggctccgcccccctgacgagcatcacaaaaatcgacgctcaagtcagaggtggcgaaacccgacaggactataaagataccaggcgtttccccctggaagctccctcgtgcgctctcctgttccgaccctgccgcttaccggatacctgtccgcctttctcccttcgggaagcgtggcgctttctcatagctcacgctgtaggtatctcagttcggtgtaggtcgttcgctccaagctgggctgtgtgcacgaaccccccgttcagcccgaccgctgcgccttatccggtaactatcgtcttgagtccaacccggtaagacacgacttatcgccactggcagcagccactggtaacaggattagcagagcgaggtatgtaggcggtgctacagagttcttgaagtggtggcctaactacggctacactagaaggacagtatttggtatctgcgctctgctgaagccagttaccttcggaaaaagagttggtagctcttgatccggcaaacaaaccaccgctggtagcggtggtttttttgtttgcaagcagcagattacgcgcagaaaaaaaggatctcaagaagatcctttgatcttttctacggggtctgacgctcagtggaacgaaaactcacgttaagggattttggtcatgagattatcaaaaaggatcttcacctagatccttttaaattaaaaatgaagttttaaatcaatctaaagtatatatgagtaaacttggtctgacagttaccaatgcttaatcagtgaggcacctatctcagcgatctgtctatttcgttcatccatagttgcctgactccccgtcgtgtagataactacgatacgggagggcttaccatctggccccagtgctgcaatgataccgcgagacccacgctcaccggctccagatttatcagcaataaaccagccagccggaagggccgagcgcagaagtggtcctgcaactttatccgcctccatccagtctattaattgttgccgggaagctagagtaagtagttcgccagttaatagtttgcgcaacgttgttgccattgctacaggcatcgtggtgtcacgctcgtcgtttggtatggcttcattcagctccggttcccaacgatcaaggcgagttacatgatcccccatgttgtgcaaaaaagcggttagctccttcggtcctccgatcgttgtcagaagtaagttggccgcagtgttatcactcatggttatggcagcactgcataattctcttactgtcatgccatccgtaagatgcttttctgtgactggtgagtactcaaccaagtcattctgagaatagtgtatgcggcgaccgagttgctcttgcccggcgtcaatacgggataataccgcgccacatagcagaactttaaaagtgctcatcattggaaaacgttcttcggggcgaaaactctcaaggatcttaccgctgttgagatccagttcgatgtaacccactcgtgcacccaactgatcttcagcatcttttactttcaccagcgtttctgggtgagcaaaaacaggaaggcaaaatgccgcaaaaaagggaataagggcgacacggaaatgttgaatactcatactcttcctttttcaatattattgaagcatttatcagggttattgtctcatgagcggatacatatttgaatgtatttagaaaaataaacaaataggggttccgcgcacatttccccgaaaagtgccacctgacgtctaagaaaccattattatcatgacattaacctataaaaataggcgtatcacgaggccctttcgtc

SEQ ID NO: 441 - DNA, 6189 bp, synthetic construct
  source 1..6189: mol_type = other DNA
tcgcgcgtttcggtgatgacggtgaaaacctctgacacatgcagctcccggagacggtcacagcttgtctgtaagcggatgccgggagcagacaagcccgtcagggcgcgtcagcgggtgttggcgggtgtcggggctggcttaactatgcggcatcagagcagattgtactgagagtgcaccatatgcggtgtgaaataccgcacagatgcgtaaggagaaaataccgcatcaggcgccattcgccattcaggctgcgcaactgttgggaagggcgatcggtgcgggcctcttcgctattacgccagctggcgaaagggggatgtgctgcaaggcgattaagttgggtaacgccagggttttcccagtcacgacgttgtaaaacgacggccagtgcacagtgctaaggatgctcagagggcatctctgataggcagaggtgagggttagggaaggaagctgtagtctagctagctagagctgctggaatagacatgacaatggctgctgccaaactgttttctcttctgaggacagatgtcccgtgcaagtggcttggtggaagggactagtgtctctaatatagggtgatttataagcaggaaagtgtgtcctagaaattcagaccagagtgatagattggaattggatcatgggggactcattgaatgttatttattgtatttgtttttgcgatcagtgttagtaaagtgtcaaagggattgagcagatgagtgacatcatgcaacacaagttttgagtttcacttgtcagactgactggagaggggcctggttagttacaggaaggtaatttggcatgcagccactatttttgagttgatgcaagcctctctgtatggagagctggtctcctttatcctgtgggaaaagagaacaaaggagcatgggagtgttcaagggaaggagaaataaagggcagagaggcagcggtggtgtcaggggaagcccacaggagttaacagcagggttgcctcaacctagagaggaagcgacctggtgccctcggctctgtggcttccttcatctaacaacatcttccactctacaacaatgccagggaaggcggaggctggtacagtgcatcaagacacagctactcctgggtgacagaggttcagggccagctcactaagtaggcagaagtttttgacatatactttgagagataaagcaagattctgtacctcaaccttcagaatttcccctaccactcattatagttccggagctatatagctcctatcattctatcataaccttagaataccagagaacatatcatctcatctaattatctcttactatatgtgaaaaaaatgaaggacatgggggaagtgtgacttgccccaaatcacatatttcatggtagagggctgggcttggccatgaaggagcatgagttcactgagttccctttggcttttccatgctagcaatgcacgtggcccagcctgctgtggtactggccagcagccgaggcatcgccagctttgtgtgtgagtatgcatctccaggcaaagccactgaggtccgggtgacagtgctttggcaggctgacagccaggtgactgaagtctgtgcggcaacctacatgatggggaatgagttgaccttcctagatgattccatctgcacgggcacctccagtggaaatcaagtgaacctcactatccaaggactgagggccatggacacgggactctacatctgcaaggtggagctcatgtacccaccgccatactacctgggcataggcaacggaacccagatttatgtaattgatccagaaccgtgcccagattctgacttcctcctctggatccttgcagcagttagttcggggttgtttttttatagctttctcctcacagctgtttctttgagcaaaatgctaaagaaaagaagccctcttacaacaggggtctatgtgaaaatgcccccaacagagccagaatgtgaaaagcaatttcagccttattttattcccatcaatggatctggaggaactagcggcagcaagggcgaggagctgttcaccggggtggtgcccatcctggtcgagctggacggcgacgtaaacggccacaagttcagcgtgcgcggcgagggcgagggcgatgccaccaacggcaagctgaccctgaagttcatctgcaccaccggcaagctgcccgtgccctggcccaccctcgtgaccaccctgacctacggcgtgcagtgcttcagccgctaccccgaccacatgaagcgccacgacttcttcaagtccgccatgcccgaaggctacgtccaggagcgcaccatcagcttcaaggacgacggcacctacaagacccgcgccgaggtgaagttcgagggcgacaccctggtgaaccgcatcgagctgaagggcatcgacttcaaggaggacggcaacatcctggggcacaagctggagtacaacttcaacagccacaacgtctatatcaccgccgacaagcagaagaacggcatcaaggccaacttcaagatccgccacaacgtggaggacggcagcgtgcagctcgccgaccactaccagcagaacacccccatcggcgacggccccgtgctgctgcccgacaaccactacctgagcacccagtccgtgctgagcaaagaccccaacgagaagcgcgatcacatggtcctgctggagttcgtgaccgccgccgggatcacttgacaccgggtcttcaacttgtttattgcagcttataatggttacaaataaagcaatagcatcacaaatttcacaaataaagcatttttttcactgcattctagttgtggtttgtccaaactcatcaatgtatcttatcatgtctggaagacctgtttacctcttctgtttgtcatatcagtgttcttcctgccacaaccatcttgaagaatctatttctcagtaagaaaatatctttatggagagtagctggaaaacagttgagagatggaggggaggctgggggtgtggagaggggaaggggtaagtgatagattcgttgaaggggggagaaaaggccgtggggatgaagctagaaggcagaagggcttgcctgggcttggccatgaaggagcatgagttcactgagttccctttggcttttccatgctaccaatgcacgtggcccagcctgctgtggtactggccagcagccgaggcatcgccagctttgtgtgtgagtatgcatctccaggcaaagccactgaggtccgggtgacagtgcttcggcaggctgacagccaggtgactgaagtctgtgcggcaacctacatgatggggaatgagttgaccttcctagatgattccatctgcacgggcacctccagtggaaatcaagtgaacctcactatccaaggactgagggccatggacacgggactctacatctgcaaggtggagctcatgtacccaccgccatactacctgggcataggcaacggaacccagatttatgtaattggtgagcaaagccatttcactgagttgacacctgttgcattgcagtcatctatgcacaaaaacagttttgttccttaatttcaggaggtttacttttaggactgtggacattctctttaagagttctgtaccacatggtagccttgcttattgtgggtggcaaccttaatagcattctgactgtaaaataaaatgatttggggaagttggggctctcgctctggagtgctaaccatcatgacgtttgatctgtacttttgatatgatatgatgctcctggggaagtagtcccaaatagccaaacctattggtgggctacccatgcaatttaggggtggacctcaaggcctggaagctctaatgtccttttttcaccaatgttggggagtagagccctagcgagctcggtacccggggatcctctagagtcgacctgcaggcatgcaagcttggcgtaatcatggtcatagctgtttcctgtgtgaaattgttatccgctcacaattccacacaacatacgagccggaagcataaagtgtaaagcctggggtgcctaatgagtgagctaactcacattaattgcgttgcgctcactgcccgctttccagtcgggaaacctgtcgtgccagctgcattaatgaatcggccaacgcgcggggagaggcggtttgcgtattgggcgctcttccgcttcctcgctcactgactcgctgcgctcggtcgttcggctgcggcgagcggtatcagctcactcaaaggcggtaatacggttatccacagaatcaggggataacgcaggaaagaacatgtgagcaaaaggccagcaaaaggccaggaaccgtaaaaaggccgcgttgctggcgtttttccataggctccgcccccctgacgagcatcacaaaaatcgacgctcaagtcagaggtggcgaaacccgacaggactataaagataccaggcgtttccccctggaagctccctcgtgcgctctcctgttccgaccctgccgcttaccggatacctgtccgcctttctcccttcgggaagcgtggcgctttctcatagctcacgctgtaggtatctcagttcggtgtaggtcgttcgctccaagctgggctgtgtgcacgaaccccccgttcagcccgaccgctgcgccttatccggtaactatcgtcttgagtccaacccggtaagacacgacttatcgccactggcagcagccactggtaacaggattagcagagcgaggtatgtaggcggtgctacagagttcttgaagtggtggcctaactacggctacactagaaggacagtatttggtatctgcgctctgctgaagccagttaccttcggaaaaagagttggtagctcttgatccggcaaacaaaccaccgctggtagcggtggtttttttgtttgcaagcagcagattacgcgcagaaaaaaaggatctcaagaagatcctttgatcttttctacggggtctgacgctcagtggaacgaaaactcacgttaagggattttggtcatgagattatcaaaaaggatcttcacctagatccttttaaattaaaaatgaagttttaaatcaatctaaagtatatatgagtaaacttggtctgacagttaccaatgcttaatcagtgaggcacctatctcagcgatctgtctatttcgttcatccatagttgcctgactccccgtcgtgtagataactacgatacgggagggcttaccatctggccccagtgctgcaatgataccgcgagacccacgctcaccggctccagatttatcagcaataaaccagccagccggaagggccgagcgcagaagtggtcctgcaactttatccgcctccatccagtctattaattgttgccgggaagctagagtaagtagttcgccagttaatagtttgcgcaacgttgttgccattgctacaggcatcgtggtgtcacgctcgtcgtttggtatggcttcattcagctccggttcccaacgatcaaggcgagttacatgatcccccatgttgtgcaaaaaagcggttagctccttcggtcctccgatcgttgtcagaagtaagttggccgcagtgttatcactcatggttatggcagcactgcataattctcttactgtcatgccatccgtaagatgcttttctgtgactggtgagtactcaaccaagtcattctgagaatagtgtatgcggcgaccgagttgctcttgcccggcgtcaatacgggataataccgcgccacatagcagaactttaaaagtgctcatcattggaaaacgttcttcggggcgaaaactctcaaggatcttaccgctgttgagatccagttcgatgtaacccactcgtgcacccaactgatcttcagcatcttttactttcaccagcgtttctgggtgagcaaaaacaggaaggcaaaatgccgcaaaaaagggaataagggcgacacggaaatgttgaatactcatactcttcctttttcaatattattgaagcatttatcagggttattgtctcatgagcggatacatatttgaatgtatttagaaaaataaacaaataggggttccgcgcacatttccccgaaaagtgccacctgacgtctaagaaaccattattatcatgacattaacctataaaaataggcgtatcacgaggccctttcgtc

SEQ ID NO: 442 - DNA, 6189 bp, synthetic construct
  source 1..6189: mol_type = other DNA
tcgcgcgtttcggtgatgacggtgaaaacctctgacacatgcagctcccggagacggtcacagcttgtctgtaagcggatgccgggagcagacaagcccgtcagggcgcgtcagcgggtgttggcgggtgtcggggctggcttaactatgcggcatcagagcagattgtactgagagtgcaccatatgcggtgtgaaataccgcacagatgcgtaaggagaaaataccgcatcaggcgccattcgccattcaggctgcgcaactgttgggaagggcgatcggtgcgggcctcttcgctattacgccagctggcgaaagggggatgtgctgcaaggcgattaagttgggtaacgccagggttttcccagtcacgacgttgtaaaacgacggccagtgcacagtgctaaggatgctcagagggcatctctgataggcagaggtgagggttagggaaggaagctgtagtctagctagctagagctgctggaatagacatgacaatggctgctgccaaactgttttctcttctgaggacagatgtcccgtgcaagtggcttggtggaagggactagtgtctctaatatagggtgatttataagcaggaaagtgtgtcctagaaattcagaccagagtgatagattggaattggatcatgggggactcattgaatgttatttattgtatttgtttttgcgatcagtgttagtaaagtgtcaaagggattgagcagatgagtgacatcatgcaacacaagttttgagtttcacttgtcagactgactggagaggggcctggttagttacaggaaggtaatttggcatgcagccactatttttgagttgatgcaagcctctctgtatggagagctggtctcctttatcctgtgggaaaagagaacaaaggagcatgggagtgttcaagggaaggagaaataaagggcagagaggcagcggtggtgtcaggggaagcccacaggagttaacagcagggttgcctcaacctagagaggaagcgacctggtgccctcggctctgtggcttccttcatctaacaacatcttccactctacaacaatgccagggaaggcggaggctggtacagtgcatcaagacacagctactcctgggtgacagaggttcagggccagctcactaagtaggcagaagtttttgacatatactttgagagataaagcaagattctgtacctcaaccttcagaatttcccctaccactcattatagttccggagctatatagctcctatcattctatcataaccttagaataccagagaacatatcatctcatctaattatctcttactatatgtgaaaaaaatgaaggacatgggggaagtgtgacttgccccaaatcacatatttcatggtagagggctgggcttggccatgaaggagcatgagttcactgagttccctttggcttttccatgctagcaatgcacgtggcccagcctgctgtggtactggccagcagccgaggcatcgccagctttgtgtgtgagtatgcatctccaggcaaagccactgaggtccgggtgacagtgcttcggcaggctgacagccaggtgactgaagtctgtgcggcaacctacatgatggggaatgagttgaccttcctagatgattccatctgcacgggcacctccagtggaaatcaagtgaacctcactatccaaggactgagggccatggacccgggactctacatctgcaaggtggagctcatgtacccaccgccatactacctgggcataggcaacggaacccagatttatgtaattgatccagaaccgtgcccagattctgacttcctcctctggatccttgcagcagttagttcggggttgtttttttatagctttctcctcacagctgtttctttgagcaaaatgctaaagaaaagaagccctcttacaacaggggtctatgtgaaaatgcccccaacagagccagaatgtgaaaagcaatttcagccttattttattcccatcaatggatctggaggaactagcggcagcaagggcgaggagctgttcaccggggtggtgcccatcctggtcgagctggacggcgacgtaaacggccacaagttcagcgtgcgcggcgagggcgagggcgatgccaccaacggcaagctgaccctgaagttcatctgcaccaccggcaagctgcccgtgccctggcccaccctcgtgaccaccctgacctacggcgtgcagtgcttcagccgctaccccgaccacatgaagcgccacgacttcttcaagtccgccatgcccgaaggctacgtccaggagcgcaccatcagcttcaaggacgacggcacctacaagacccgcgccgaggtgaagttcgagggcgacaccctggtgaaccgcatcgagctgaagggcatcgacttcaaggaggacggcaacatcctggggcacaagctggagtacaacttcaacagccacaacgtctatatcaccgccgacaagcagaagaacggcatcaaggccaacttcaagatccgccacaacgtggaggacggcagcgtgcagctcgccgaccactaccagcagaacacccccatcggcgacggccccgtgctgctgcccgacaaccactacctgagcacccagtccgtgctgagcaaagaccccaacgagaagcgcgatcacatggtcctgctggagttcgtgaccgccgccgggatcacttgacaccgggtcttcaacttgtttattgcagcttataatggttacaaataaagcaatagcatcacaaatttcacaaataaagcatttttttcactgcattctagttgtggtttgtccaaactcatcaatgtatcttatcatgtctggaagacctgtttacctcttctgtttgtcatatcagtgttcttcctgccacaaccatcttgaagaatctatttctcagtaagaaaatatctttatggagagtagctggaaaacagttgagagatggaggggaggctgggggtgtggagaggggaaggggtaagtgatagattcgttgaaggggggagaaaaggccgtggggatgaagctagaaggcagaagggcttgcctgggcttggccatgaaggagcatgagttcactgagttccctttggcttttccatgctaccaatgcacgtggcccagcctgctgtggtactggccagcagccgaggcatcgccagctttgtgtgtgagtatgcatctccaggcaaagccactgaggtccgggtgacagtgcttcggcaggctgacagccaggtgactgaagtctgtgcggcaacctacatgatggggaatgagttgaccttcctagatgattccatctgcacgggcacctccagtggaaatcaagtgaacctcactatccaaggactgagggccatggacacgggactctacatctgcaaggtggagctcatgtacccaccgccatactacctgggcataggcaacggaacccagatttatgtaattggtgagcaaagccatttcactgagttgacacctgttgcattgcagtcatctatgcacaaaaacagttttgttccttaatttcaggaggtttacttttaggactgtggacattctctttaagagttctgtaccacatggtagccttgcttattgtgggtggcaaccttaatagcattctgactgtaaaataaaatgatttggggaagttggggctctcgctctggagtgctaaccatcatgacgtttgatctgtacttttgatatgatatgatgctcctggggaagtagtcccaaatagccaaacctattggtgggctacccatgcaatttaggggtggacctcaaggcctggaagctctaatgtccttttttcaccaatgttggggagtagagccctagcgagctcggtacccggggatcctctagagtcgacctgcaggcatgcaagcttggcgtaatcatggtcatagctgtttcctgtgtgaaattgttatccgctcacaattccacacaacatacgagccggaagcataaagtgtaaagcctggggtgcctaatgagtgagctaactcacattaattgcgttgcgctcactgcccgctttccagtcgggaaacctgtcgtgccagctgcattaatgaatcggccaacgcgcggggagaggcggtttgcgtattgggcgctcttccgcttcctcgctcactgactcgctgcgctcggtcgttcggctgcggcgagcggtatcagctcactcaaaggcggtaatacggttatccacagaatcaggggataacgcaggaaagaacatgtgagcaaaaggccagcaaaaggccaggaaccgtaaaaaggccgcgttgctggcgtttttccataggctccgcccccctgacgagcatcacaaaaatcgacgctcaagtcagaggtggcgaaacccgacaggactataaagataccaggcgtttccccctggaagctccctcgtgcgctctcctgttccgaccctgccgcttaccggatacctgtccgcctttctcccttcgggaagcgtggcgctttctcatagctcacgctgtaggtatctcagttcggtgtaggtcgttcgctccaagctgggctgtgtgcacgaaccccccgttcagcccgaccgctgcgccttatccggtaactatcgtcttgagtccaacccggtaagacacgacttatcgccactggcagcagccactggtaacaggattagcagagcgaggtatgtaggcggtgctacagagttcttgaagtggtggcctaactacggctacactagaaggacagtatttggtatctgcgctctgctgaagccagttaccttcggaaaaagagttggtagctcttgatccggcaaacaaaccaccgctggtagcggtggtttttttgtttgcaagcagcagattacgcgcagaaaaaaaggatctcaagaagatcctttgatcttttctacggggtctgacgctcagtggaacgaaaactcacgttaagggattttggtcatgagattatcaaaaaggatcttcacctagatccttttaaattaaaaatgaagttttaaatcaatctaaagtatatatgagtaaacttggtctgacagttaccaatgcttaatcagtgaggcacctatctcagcgatctgtctatttcgttcatccatagttgcctgactccccgtcgtgtagataactacgatacgggagggcttaccatctggccccagtgctgcaatgataccgcgagacccacgctcaccggctccagatttatcagcaataaaccagccagccggaagggccgagcgcagaagtggtcctgcaactttatccgcctccatccagtctattaattgttgccgggaagctagagtaagtagttcgccagttaatagtttgcgcaacgttgttgccattgctacaggcatcgtggtgtcacgctcgtcgtttggtatggcttcattcagctccggttcccaacgatcaaggcgagttacatgatcccccatgttgtgcaaaaaagcggttagctccttcggtcctccgatcgttgtcagaagtaagttggccgcagtgttatcactcatggttatggcagcactgcataattctcttactgtcatgccatccgtaagatgcttttctgtgactggtgagtactcaaccaagtcattctgagaatagtgtatgcggcgaccgagttgctcttgcccggcgtcaatacgggataataccgcgccacatagcagaactttaaaagtgctcatcattggaaaacgttcttcggggcgaaaactctcaaggatcttaccgctgttgagatccagttcgatgtaacccactcgtgcacccaactgatcttcagcatcttttactttcaccagcgtttctgggtgagcaaaaacaggaaggcaaaatgccgcaaaaaagggaataagggcgacacggaaatgttgaatactcatactcttcctttttcaatattattgaagcatttatcagggttattgtctcatgagcggatacatatttgaatgtatttagaaaaataaacaaataggggttccgcgcacatttccccgaaaagtgccacctgacgtctaagaaaccattattatcatgacattaacctataaaaataggcgtatcacgaggccctttcgtc

SEQ ID NO: 443 - DNA, 5497 bp, synthetic construct
  source 1..5497: mol_type = other DNA
tcgcgcgtttcggtgatgacggtgaaaacctctgacacatgcagctcccggagacggtcacagcttgtctgtaagcggatgccgggagcagacaagcccgtcagggcgcgtcagcgggtgttggcgggtgtcggggctggcttaactatgcggcatcagagcagattgtactgagagtgcaccatatgcggtgtgaaataccgcacagatgcgtaaggagaaaataccgcatcaggcgccattcgccattcaggctgcgcaactgttgggaagggcgatcggtgcgggcctcttcgctattacgccagctggcgaaagggggatgtgctgcaaggcgattaagttgggtaacgccagggttttcccagtcacgacgttgtaaaacgacggccagtgaattcgagctcggtacccggggatcccttgcccggagggttttctttttgttaatatctttgcttgctttctagtatttaaaaaattgtgttttgctctaactatgcaatggctttaagtcttagacaaatttccagggagcaaaacacactcaaccatttcataataatcagaagagagctctgatcaataaataagcaagactgaattttacaaaataatccaaagtttaaaaccaaagcccactttttgcatgatcctttaagagaaagaaatctggaagcaaaacaccttataaaatgacaatgcactttcaggagcccagggcactgtggtgaaatgatgatggctagtacaggttataagccttggggaattatttatgaattctcacgatccttcagttcgccgcatccttctccattatttgaatattggaggctgcctgaccagaatcttgtcaggactttgctccttcatcccaggtggtcccggctgactcctgaggacgttacagccctgaggggaggactcagcttatgaagtgctgggtgagaccactgccaagaagtgcttgctcaccctaccttcaacggcaggggaatctccctctccttttatgggcgtagctgaagaaaggattcataaatgaagttcaatccttctcatcaaccccagcccacacctccagcaattgaacttgaaaaaaaaaacctggtttgaaaaattaccgcaaactatattgtcatcaaaaaaaaaaaaaaaaaaaaacacttcctatatttgagatgagagaagagagtgctaggcagtttcctggctgaacacgccagcccaatacttaaagagagcaactcctgactccgatagagactggatggacccacaagggtgacagcccaggcggaccgatcttcccatcccacatcctccggcgcgatgccaaaaagaggctgacggcaactgggccttctgcagagaaagacctccgcttcactgccccggctggtcccaagggtcaggaagatgagcaagggcgaggagctgttcaccggggtggtgcccatcctggtcgagctggacggcgacgtaaacggccacaagttcagcgtgcgcggcgagggcgagggcgatgccaccaacggcaagctgaccctgaagttcatctgcaccaccggcaagctgcccgtgccctggcccaccctcgtgaccaccctgacctacggcgtgcagtgcttcagccgctaccccgaccacatgaagcgccacgacttcttcaagtccgccatgcccgaaggctacgtccaggagcgcaccatcagcttcaaggacgacggcacctacaagacccgcgccgaggtgaagttcgagggcgacaccctggtgaaccgcatcgagctgaagggcatcgacttcaaggaggacggcaacatcctggggcacaagctggagtacaacttcaacagccacaacgtctatatcaccgccgacaagcagaagaacggcatcaaggccaacttcaagatccgccacaacgtggaggacggcagcgtgcagctcgccgaccactaccagcagaacacccccatcggcgacggccccgtgctgctgcccgacaaccactacctgagcacccagtccgtgctgagcaaagaccccaacgagaagcgcgatcacatggtcctgctggagttcgtgaccgccgccgggatcactggatctggagcaacaaacttctcactactcaaacaagcaggtgacgtggaggagaatcccggccccatggacagctatttgctcatgtggggactgctcacgttcatcatggtgcctggctgccaggcaggtaagggcctgtgggtgcccccggaattccgggaaggctgatgggcatccctcttcccagccacagaaccagagggagtccccaggtagatggttccaagaagggagttgaatcttgggttccacctcttgcctgtgacccacggggaccccagtttatgcctcactgttccttggtctgtcaagagagcctgaaatagcattaggttctcctgtccttctcagtccttgacaattaattctgggaagaatagtgtggcatgatatttgggatatttggatgttaacagggtcccgatgagcaggtttctcaagaaattatcttttattcttcaatgaatttccttttattctctgcactcccaccccccaactaagaagctatcaggaagctctttaagttcaggttaatttgctggagacatgagtactcatatatcaaacactgggagaatttaagatctcagaaaagtttagcttcaaggatgtatacactgcttttacgtcttaggaaataacacctaggaatttccttacaagtgcaactttacagaaatttttaaaaatatgcatactcacttttagaacattactacttctcataatcctatgtatatacatgatatgtatatgtatacgtgtttatatatgcaaattttaaatttcattccttgtttcaaatggattttctcgaagattttttttttttgacactgtctctgtcagccagactggagtgcagtggcgcgatattggcttactgcaaccttcgcctcccaggcttagcgatcctcccacctcagcctcctgagtagctgggactacaggcatacgccaccacacctggttaatttatttttttgtagagatggggtttttgccatgttgcccaagctggtcttgaactcctgggctcaagtgatccactcaccctggcctcccatactgctggtactacaggcatgaaccaccgtgcctggccaataggatcctctagagtcgacctgcaggcatgcaagcttggcgtaatcatggtcatagctgtttcctgtgtgaaattgttatccgctcacaattccacacaacatacgagccggaagcataaagtgtaaagcctggggtgcctaatgagtgagctaactcacattaattgcgttgcgctcactgcccgctttccagtcgggaaacctgtcgtgccagctgcattaatgaatcggccaacgcgcggggagaggcggtttgcgtattgggcgctcttccgcttcctcgctcactgactcgctgcgctcggtcgttcggctgcggcgagcggtatcagctcactcaaaggcggtaatacggttatccacagaatcaggggataacgcaggaaagaacatgtgagcaaaaggccagcaaaaggccaggaaccgtaaaaaggccgcgttgctggcgtttttccataggctccgcccccctgacgagcatcacaaaaatcgacgctcaagtcagaggtggcgaaacccgacaggactataaagataccaggcgtttccccctggaagctccctcgtgcgctctcctgttccgaccctgccgcttaccggatacctgtccgcctttctcccttcgggaagcgtggcgctttctcatagctcacgctgtaggtatctcagttcggtgtaggtcgttcgctccaagctgggctgtgtgcacgaaccccccgttcagcccgaccgctgcgccttatccggtaactatcgtcttgagtccaacccggtaagacacgacttatcgccactggcagcagccactggtaacaggattagcagagcgaggtatgtaggcggtgctacagagttcttgaagtggtggcctaactacggctacactagaaggacagtatttggtatctgcgctctgctgaagccagttaccttcggaaaaagagttggtagctcttgatccggcaaacaaaccaccgctggtagcggtggtttttttgtttgcaagcagcagattacgcgcagaaaaaaaggatctcaagaagatcctttgatcttttctacggggtctgacgctcagtggaacgaaaactcacgttaagggattttggtcatgagattatcaaaaaggatcttcacctagatccttttaaattaaaaatgaagttttaaatcaatctaaagtatatatgagtaaacttggtctgacagttaccaatgcttaatcagtgaggcacctatctcagcgatctgtctatttcgttcatccatagttgcctgactccccgtcgtgtagataactacgatacgggagggcttaccatctggccccagtgctgcaatgataccgcgagacccacgctcaccggctccagatttatcagcaataaaccagccagccggaagggccgagcgcagaagtggtcctgcaactttatccgcctccatccagtctattaattgttgccgggaagctagagtaagtagttcgccagttaatagtttgcgcaacgttgttgccattgctacaggcatcgtggtgtcacgctcgtcgtttggtatggcttcattcagctccggttcccaacgatcaaggcgagttacatgatcccccatgttgtgcaaaaaagcggttagctccttcggtcctccgatcgttgtcagaagtaagttggccgcagtgttatcactcatggttatggcagcactgcataattctcttactgtcatgccatccgtaagatgcttttctgtgactggtgagtactcaaccaagtcattctgagaatagtgtatgcggcgaccgagttgctcttgcccggcgtcaatacgggataataccgcgccacatagcagaactttaaaagtgctcatcattggaaaacgttcttcggggcgaaaactctcaaggatcttaccgctgttgagatccagttcgatgtaacccactcgtgcacccaactgatcttcagcatcttttactttcaccagcgtttctgggtgagcaaaaacaggaaggcaaaatgccgcaaaaaagggaataagggcgacacggaaatgttgaatactcatactcttcctttttcaatattattgaagcatttatcagggttattgtctcatgagcggatacatatttgaatgtatttagaaaaataaacaaataggggttccgcgcacatttccccgaaaagtgccacctgacgtctaagaaaccattattatcatgacattaacctataaaaataggcgtatcacgaggccctttcgtc

SEQ ID NO: 444 - DNA, 6335 bp, synthetic construct
  source 1..6335: mol_type = other DNA
tcgcgcgtttcggtgatgacggtgaaaacctctgacacatgcagctcccggagacggtcacagcttgtctgtaagcggatgccgggagcagacaagcccgtcagggcgcgtcagcgggtgttggcgggtgtcggggctggcttaactatgcggcatcagagcagattgtactgagagtgcaccatatgcggtgtgaaataccgcacagatgcgtaaggagaaaataccgcatcaggcgccattcgccattcaggctgcgcaactgttgggaagggcgatcggtgcgggcctcttcgctattacgccagctggcgaaagggggatgtgctgcaaggcgattaagttgggtaacgccagggttttcccagtcacgacgttgtaaaacgacggccagtgaattcgagctcggtacccggggatcccttgcccggagggttttctttttgttaatatctttgcttgctttctagtatttaaaaaattgtgttttgctctaactatgcaatggctttaagtcttagacaaatttccagggagcaaaacacactcaaccatttcataataatcagaagagagctctgatcaataaataagcaagactgaattttacaaaataatccaaagtttaaaaccaaagcccactttttgcatgatcctttaagagaaagaaatctggaagcaaaacaccttataaaatgacaatgcactttcaggagcccagggcactgtggtgaaatgatgatggctagtacaggttataagccttggggaattatttatgaattctcacgatccttcagttcgccgcatccttctccattatttgaatattggaggctgcctgaccagaatcttgtcaggactttgctccttcatcccaggtggtcccggctgactcctgaggacgttacagccctgaggggaggactcagcttatgaagtgctgggtgagaccactgccaagaagtgcttgctcaccctaccttcaacggcaggggaatctccctctccttttatgggcgtagctgaagaaaggattcataaatgaagttcaatccttctcatcaaccccagcccacacctccagcaattgaacttgaaaaaaaaaacctggtttgaaaaattaccgcaaactatattgtcatcaaaaaaaaaaaaaaaaaaaaacacttcctatatttgagatgagagaagagagtgctaggcagtttcctggctgaacacgccagcccaatacttaaagagagcaactcctgactccgatagagactggatggacccacaagggtgacagcccaggcggaccgatcttcccatcccacatcctccggcgcgatgccaaaaagaggctgacggcaactgggccttctgcagagaaagacctccgcttcactgccccggctggtcccaagggtcaggaagatggattcatatttgctcatgtggggcctcctgacctttattatggtccctggctgtcaagcagagctctgtgacgatgacccgccagagatcccacacgccacattcaaagccatggcctacaaggaaggaaccatgttgaactgtgaatgcaagagaggtttccgcagaataaaaagcgggtcactctatatgctctgtacaggaaactctagccactcgtcctgggacaaccaatgtcaatgcacaagctctgccactcggaacacaacgaaacaagtgacacctcaacctgaagaacagaaagaaaggaaaaccacagaaatgcaaagtccaatgcagccagtggaccaagcgagccttccaggtcactgcagggaacctccaccatgggaaaatgaagccacagagagaatttatcatttcgtggtggggcagatggtttattatcagtgcgtccagggatacagggctctacacagaggtcctgctgagagcgtctgcaaaatgacccacgggaagacaaggtggacccagccccagctcatatgcacaggtgaaatggagaccagtcagtttccaggtgaagagaagcctcaggcaagccccgaaggccgtcctgagagtgagacttcctgcctcgtcacaacaacagattttcaaatacagacagaaatggctgcaaccatggagacgtccatatttacaacagagtaccaggtagcagtggccggctgtgttttcctgctgatcagcgtcctcctcctgagtgggctcacctggcagcggagacagaggaagagtagaagaacaatcggatcgggtgggactagtggcagcaagggcgaggagctgttcaccggggtggtgcccatcctggtcgagctggacggcgacgtaaacggccacaagttcagcgtgcgcggcgagggcgagggcgatgccaccaacggcaagctgaccctgaagttcatctgcaccaccggcaagctgcccgtgccctggcccaccctcgtgaccaccctgacctacggcgtgcagtgcttcagccgctaccccgaccacatgaagcgccacgacttcttcaagtccgccatgcccgaaggctacgtccaggagcgcaccatcagcttcaaggacgacggcacctacaagacccgcgccgaggtgaagttcgagggcgacaccctggtgaaccgcatcgagctgaagggcatcgacttcaaggaggacggcaacatcctggggcacaagctggagtacaacttcaacagccacaacgtctatatcaccgccgacaagcagaagaacggcatcaaggccaacttcaagatccgccacaacgtggaggacggcagcgtgcagctcgccgaccactaccagcagaacacccccatcggcgacggccccgtgctgctgcccgacaaccactacctgagcacccagtccgtgctgagcaaagaccccaacgagaagcgcgatcacatggtcctgctggagttcgtgaccgccgccgggatcacttagaacttgtttattgcagcttataatggttacaaataaagcaatagcatcacaaatttcacaaataaagcatttttttcactgcattctagttgtggtttgtccaaactcatcaatgtatcttatcatgtctggtaagggcctgtgggtgcccccggaattccgggaaggctgatgggcatccctcttcccagccacagaaccagagggagtccccaggtagatggttccaagaagggagttgaatcttgggttccacctcttgcctgtgacccacggggaccccagtttatgcctcactgttccttggtctgtcaagagagcctgaaatagcattaggttctcctgtccttctcagtccttgacaattaattctgggaagaatagtgtggcatgatatttgggatatttggatgttaacagggtcccgatgagcaggtttctcaagaaattatcttttattcttcaatgaatttccttttattctctgcactcccaccccccaactaagaagctatcaggaagctctttaagttcaggttaatttgctggagacatgagtactcatatatcaaacactgggagaatttaagatctcagaaaagtttagcttcaaggatgtatacactgcttttacgtcttaggaaataacacctaggaatttccttacaagtgcaactttacagaaatttttaaaaatatgcatactcacttttagaacattactacttctcataatcctatgtatatacatgatatgtatatgtatacgtgtttatatatgcaaattttaaatttcattccttgtttcaaatggattttctcgaagattttttttttttgacactgtctctgtcagccagactggagtgcagtggcgcgatattggcttactgcaaccttcgcctcccaggcttagcgatcctcccacctcagcctcctgagtagctgggactacaggcatacgccaccacacctggttaatttatttttttgtagagatggggtttttgccatgttgcccaagctggtcttgaactcctgggctcaagtgatccactcaccctggcctcccatactgctggtactacaggcatgaaccaccgtgcctggccaataggatcctctagagtcgacctgcaggcatgcaagcttggcgtaatcatggtcatagctgtttcctgtgtgaaattgttatccgctcacaattccacacaacatacgagccggaagcataaagtgtaaagcctggggtgcctaatgagtgagctaactcacattaattgcgttgcgctcactgcccgctttccagtcgggaaacctgtcgtgccagctgcattaatgaatcggccaacgcgcggggagaggcggtttgcgtattgggcgctcttccgcttcctcgctcactgactcgctgcgctcggtcgttcggctgcggcgagcggtatcagctcactcaaaggcggtaatacggttatccacagaatcaggggataacgcaggaaagaacatgtgagcaaaaggccagcaaaaggccaggaaccgtaaaaaggccgcgttgctggcgtttttccataggctccgcccccctgacgagcatcacaaaaatcgacgctcaagtcagaggtggcgaaacccgacaggactataaagataccaggcgtttccccctggaagctccctcgtgcgctctcctgttccgaccctgccgcttaccggatacctgtccgcctttctcccttcgggaagcgtggcgctttctcatagctcacgctgtaggtatctcagttcggtgtaggtcgttcgctccaagctgggctgtgtgcacgaaccccccgttcagcccgaccgctgcgccttatccggtaactatcgtcttgagtccaacccggtaagacacgacttatcgccactggcagcagccactggtaacaggattagcagagcgaggtatgtaggcggtgctacagagttcttgaagtggtggcctaactacggctacactagaaggacagtatttggtatctgcgctctgctgaagccagttaccttcggaaaaagagttggtagctcttgatccggcaaacaaaccaccgctggtagcggtggtttttttgtttgcaagcagcagattacgcgcagaaaaaaaggatctcaagaagatcctttgatcttttctacggggtctgacgctcagtggaacgaaaactcacgttaagggattttggtcatgagattatcaaaaaggatcttcacctagatccttttaaattaaaaatgaagttttaaatcaatctaaagtatatatgagtaaacttggtctgacagttaccaatgcttaatcagtgaggcacctatctcagcgatctgtctatttcgttcatccatagttgcctgactccccgtcgtgtagataactacgatacgggagggcttaccatctggccccagtgctgcaatgataccgcgagacccacgctcaccggctccagatttatcagcaataaaccagccagccggaagggccgagcgcagaagtggtcctgcaactttatccgcctccatccagtctattaattgttgccgggaagctagagtaagtagttcgccagttaatagtttgcgcaacgttgttgccattgctacaggcatcgtggtgtcacgctcgtcgtttggtatggcttcattcagctccggttcccaacgatcaaggcgagttacatgatcccccatgttgtgcaaaaaagcggttagctccttcggtcctccgatcgttgtcagaagtaagttggccgcagtgttatcactcatggttatggcagcactgcataattctcttactgtcatgccatccgtaagatgcttttctgtgactggtgagtactcaaccaagtcattctgagaatagtgtatgcggcgaccgagttgctcttgcccggcgtcaatacgggataataccgcgccacatagcagaactttaaaagtgctcatcattggaaaacgttcttcggggcgaaaactctcaaggatcttaccgctgttgagatccagttcgatgtaacccactcgtgcacccaactgatcttcagcatcttttactttcaccagcgtttctgggtgagcaaaaacaggaaggcaaaatgccgcaaaaaagggaataagggcgacacggaaatgttgaatactcatactcttcctttttcaatattattgaagcatttatcagggttattgtctcatgagcggatacatatttgaatgtatttagaaaaataaacaaataggggttccgcgcacatttccccgaaaagtgccacctgacgtctaagaaaccattattatcatgacattaacctataaaaataggcgtatcacgaggccctttcgtc

SEQ ID NO: 445 - DNA, 7554 bp, synthetic construct
  source 1..7554: mol_type = other DNA
tcgcgcgtttcggtgatgacggtgaaaacctctgacacatgcagctcccggagacggtcacagcttgtctgtaagcggatgccgggagcagacaagcccgtcagggcgcgtcagcgggtgttggcgggtgtcggggctggcttaactatgcggcatcagagcagattgtactgagagtgcaccatatgcggtgtgaaataccgcacagatgcgtaaggagaaaataccgcatcaggcgccattcgccattcaggctgcgcaactgttgggaagggcgatcggtgcgggcctcttcgctattacgccagctggcgaaagggggatgtgctgcaaggcgattaagttgggtaacgccagggttttcccagtcacgacgttgtaaaacgacggccagtgaattcgagctcggtacccggggatcccttgcccggagggttttctttttgttaatatctttgcttgctttctagtatttaaaaaattgtgttttgctctaactatgcaatggctttaagtcttagacaaatttccagggagcaaaacacactcaaccatttcataataatcagaagagagctctgatcaataaataagcaagactgaattttacaaaataatccaaagtttaaaaccaaagcccactttttgcatgatcctttaagagaaagaaatctggaagcaaaacaccttataaaatgacaatgcactttcaggagcccagggcactgtggtgaaatgatgatggctagtacaggttataagccttggggaattatttatgaattctcacgatccttcagttcgccgcatccttctccattatttgaatattggaggctgcctgaccagaatcttgtcaggactttgctccttcatcccaggtggtcccggctgactcctgaggacgttacagccctgaggggaggactcagcttatgaagtgctgggtgagaccactgccaagaagtgcttgctcaccctaccttcaacggcaggggaatctccctctccttttatgggcgtagctgaagaaaggattcataaatgaagttcaatccttctcatcaaccccagcccacacctccagcaattgaacttgaaaaaaaaaacctggtttgaaaaattaccgcaaactatattgtcatcaaaaaaaaaaaaaaaaaaaaacacttcctatatttgagatgagagaagagagtgctaggcagtttcctggctgaacacgccagcccaatacttaaagagagcaactcctgactccgatagagactggatggacccacaagggtgacagcccaggcggaccgatcttcccatcccacatcctccggcgcgatgccaaaaagaggctgacggcaactgggccttctgcagagaaagacctccgcttcactgccccggctggtcccaagggtcaggaagatggattcatatttgctcatgtggggcctcctgacctttattatggtccctggctgtcaagcagagctctgtgacgatgacccgccagagatcccacacgccacattcaaagccatggcctacaaggaaggaaccatgttgaactgtgaatgcaagagaggtttccgcagaataaaaagcgggtcactctatatgctctgtacaggaaactctagccactcgtcctgggacaaccaatgtcaatgcacaagctctgccactcggaacacaacgaaacaagtgacacctcaacctgaagaacagaaagaaaggaaaaccacagaaatgcaaagtccaatgcagccagtggaccaagcgagccttccaggtcactgcagggaacctccaccatgggaaaatgaagccacagagagaatttatcatttcgtggtggggcagatggtttattatcagtgcgtccagggatacagggctctacacagaggtcctgctgagagcgtctgcaaaatgacccacgggaagacaaggtggacccagccccagctcatatgcacaggtgaaatggagaccagtcagtttccaggtgaagagaagcctcaggcaagccccgaaggccgtcctgagagtgagacttcctgcctcgtcacaacaacagattttcaaatacagacagaaatggctgcaaccatggagacgtccatatttacaacagagtaccaggtagcagtggccggctgtgttttcctgctgatcagcgtcctcctcctgagtgggctcacctggcagcggagacagaggaagagtagaagaacaatcggatcgggtgggactagtggcagcaagggcgaggagctgttcaccggggtggtgcccatcctggtcgagctggacggcgacgtaaacggccacaagttcagcgtgcgcggcgagggcgagggcgatgccaccaacggcaagctgaccctgaagttcatctgcaccaccggcaagctgcccgtgccctggcccaccctcgtgaccaccctgacctacggcgtgcagtgcttcagccgctaccccgaccacatgaagcgccacgacttcttcaagtccgccatgcccgaaggctacgtccaggagcgcaccatcagcttcaaggacgacggcacctacaagacccgcgccgaggtgaagttcgagggcgacaccctggtgaaccgcatcgagctgaagggcatcgacttcaaggaggacggcaacatcctggggcacaagctggagtacaacttcaacagccacaacgtctatatcaccgccgacaagcagaagaacggcatcaaggccaacttcaagatccgccacaacgtggaggacggcagcgtgcagctcgccgaccactaccagcagaacacccccatcggcgacggccccgtgctgctgcccgacaaccactacctgagcacccagtccgtgctgagcaaagaccccaacgagaagcgcgatcacatggtcctgctggagttcgtgaccgccgccgggatcacttagaacttgtttattgcagcttataatggttacaaataaagcaatagcatcacaaatttcacaaataaagcatttttttcactgcattctagttgtggtttgtccaaactcatcaatgtatcttatcatgtctgatctgtaagacaagaggatccctcgagtatccagaaccctgacccgggcagagcgcacatcgcccacagtccccgagaagttggggggaggggtcggcaattgatccggtgcctagagaaggtggcgcggggtaaactgggaaagtgatgtcgtgtactggctccgcctttttcccgagggtgggggagaaccgtatataagtgcagtagtcgccgtgaacgttctttttcgcaacgggtttgccgccagaacacaggcaattccacaacagccgccatggtgagcaagggcgaggaggataacatggccatcatcaaggagttcatgcgcttcaaggtgcacatggagggctccgtgaacggccacgagttcgagatcgagggcgagggcgagggccgcccctacgagggcacccagaccgccaagctgaaggtgaccaagggtggccccctgcccttcgcctgggacatcctgtcccctcagttcatgtacggctccaaggcctacgtgaagcaccccgccgacatccccgactacttgaagctgtccttccccgagggcttcaagtgggagcgcgtgatgaacttcgaggacggcggcgtggtgaccgtgacccaggactcctccctgcaggacggcgagttcatctacaaggtgaagctgcgcggcaccaacttcccctccgacggccccgtaatgcagaagaagaccatgggctgggaggcctcctccgagcggatgtaccccgaggacggcgccctgaagggcgagatcaagcagaggctgaagctgaaggacggcggccactacgacgctgaggtcaagaccacctacaaggccaagaagcccgtgcagctgcccggcgcctacaacgtcaacatcaagttggacatcacctcccacaacgaggactacaccatcgtggaacagtacgaacgcgccgagggccgccactccaccggcggcatggacgagctgtacaagtaatgatgactgtgccttctagttgccagccatctgttgtttgcccctcccccgtgccttccttgaccctggaaggtgccactcccactgtcctttcctaataaaatgaggaaattgcatcgcattgtctgagtaggtgtcattctattctggggggtggggtggggcaggacagcaagggggaggattgggaagacaatagcaggcatgctggggatgcggtgggctctatgggtaagggcctgtgggtgcccccggaattccgggaaggctgatgggcatccctcttcccagccacagaaccagagggagtccccaggtagatggttccaagaagggagttgaatcttgggttccacctcttgcctgtgacccacggggaccccagtttatgcctcactgttccttggtctgtcaagagagcctgaaatagcattaggttctcctgtccttctcagtccttgacaattaattctgggaagaatagtgtggcatgatatttgggatatttggatgttaacagggtcccgatgagcaggtttctcaagaaattatcttttattcttcaatgaatttccttttattctctgcactcccaccccccaactaagaagctatcaggaagctctttaagttcaggttaatttgctggagacatgagtactcatatatcaaacactgggagaatttaagatctcagaaaagtttagcttcaaggatgtatacactgcttttacgtcttaggaaataacacctaggaatttccttacaagtgcaactttacagaaatttttaaaaatatgcatactcacttttagaacattactacttctcataatcctatgtatatacatgatatgtatatgtatacgtgtttatatatgcaaattttaaatttcattccttgtttcaaatggattttctcgaagattttttttttttgacactgtctctgtcagccagactggagtgcagtggcgcgatattggcttactgcaaccttcgcctcccaggcttagcgatcctcccacctcagcctcctgagtagctgggactacaggcatacgccaccacacctggttaatttatttttttgtagagatggggtttttgccatgttgcccaagctggtcttgaactcctgggctcaagtgatccactcaccctggcctcccatactgctggtactacaggcatgaaccaccgtgcctggccaataggatcctctagagtcgacctgcaggcatgcaagcttggcgtaatcatggtcatagctgtttcctgtgtgaaattgttatccgctcacaattccacacaacatacgagccggaagcataaagtgtaaagcctggggtgcctaatgagtgagctaactcacattaattgcgttgcgctcactgcccgctttccagtcgggaaacctgtcgtgccagctgcattaatgaatcggccaacgcgcggggagaggcggtttgcgtattgggcgctcttccgcttcctcgctcactgactcgctgcgctcggtcgttcggctgcggcgagcggtatcagctcactcaaaggcggtaatacggttatccacagaatcaggggataacgcaggaaagaacatgtgagcaaaaggccagcaaaaggccaggaaccgtaaaaaggccgcgttgctggcgtttttccataggctccgcccccctgacgagcatcacaaaaatcgacgctcaagtcagaggtggcgaaacccgacaggactataaagataccaggcgtttccccctggaagctccctcgtgcgctctcctgttccgaccctgccgcttaccggatacctgtccgcctttctcccttcgggaagcgtggcgctttctcatagctcacgctgtaggtatctcagttcggtgtaggtcgttcgctccaagctgggctgtgtgcacgaaccccccgttcagcccgaccgctgcgccttatccggtaactatcgtcttgagtccaacccggtaagacacgacttatcgccactggcagcagccactggtaacaggattagcagagcgaggtatgtaggcggtgctacagagttcttgaagtggtggcctaactacggctacactagaaggacagtatttggtatctgcgctctgctgaagccagttaccttcggaaaaagagttggtagctcttgatccggcaaacaaaccaccgctggtagcggtggtttttttgtttgcaagcagcagattacgcgcagaaaaaaaggatctcaagaagatcctttgatcttttctacggggtctgacgctcagtggaacgaaaactcacgttaagggattttggtcatgagattatcaaaaaggatcttcacctagatccttttaaattaaaaatgaagttttaaatcaatctaaagtatatatgagtaaacttggtctgacagttaccaatgcttaatcagtgaggcacctatctcagcgatctgtctatttcgttcatccatagttgcctgactccccgtcgtgtagataactacgatacgggagggcttaccatctggccccagtgctgcaatgataccgcgagacccacgctcaccggctccagatttatcagcaataaaccagccagccggaagggccgagcgcagaagtggtcctgcaactttatccgcctccatccagtctattaattgttgccgggaagctagagtaagtagttcgccagttaatagtttgcgcaacgttgttgccattgctacaggcatcgtggtgtcacgctcgtcgtttggtatggcttcattcagctccggttcccaacgatcaaggcgagttacatgatcccccatgttgtgcaaaaaagcggttagctccttcggtcctccgatcgttgtcagaagtaagttggccgcagtgttatcactcatggttatggcagcactgcataattctcttactgtcatgccatccgtaagatgcttttctgtgactggtgagtactcaaccaagtcattctgagaatagtgtatgcggcgaccgagttgctcttgcccggcgtcaatacgggataataccgcgccacatagcagaactttaaaagtgctcatcattggaaaacgttcttcggggcgaaaactctcaaggatcttaccgctgttgagatccagttcgatgtaacccactcgtgcacccaactgatcttcagcatcttttactttcaccagcgtttctgggtgagcaaaaacaggaaggcaaaatgccgcaaaaaagggaataagggcgacacggaaatgttgaatactcatactcttcctttttcaatattattgaagcatttatcagggttattgtctcatgagcggatacatatttgaatgtatttagaaaaataaacaaataggggttccgcgcacatttccccgaaaagtgccacctgacgtctaagaaaccattattatcatgacattaacctataaaaataggcgtatcacgaggccctttcgtc

SEQ ID NO: 446 - DNA, 5786 bp, synthetic construct
  source 1..5786: mol_type = other DNA
acatgtgagcaaaaggccagcaaaaggccaggaaccgtaaaaaggccgcgttgctggcgtttttccataggctccgcccccctgacgagcatcacaaaaatcgacgctcaagtcagaggtggcgaaacccgacaggactataaagataccaggcgtttccccctggaagctccctcgtgcgctctcctgttccgaccctgccgcttaccggatacctgtccgcctttctcccttcgggaagcgtggcgctttctcatagctcacgctgtaggtatctcagttcggtgtaggtcgttcgctccaagctgggctgtgtgcacgaaccccccgttcagcccgaccgctgcgccttatccggtaactatcgtcttgagtccaacccggtaagacacgacttatcgccactggcagcagccactggtaacaggattagcagagcgaggtatgtaggcggtgctacagagttcttgaagtggtggcctaactacggctacactagaaggacagtatttggtatctgcgctctgctgaagccagttaccttcggaaaaagagttggtagctcttgatccggcaaacaaaccaccgctggtagcggtggtttttttgtttgcaagcagcagattacgcgcagaaaaaaaggatctcaagaagatcctttgatcttttctacggggtctgacgctcagtggaacgaaaactcacgttaagggattttggtcatgagattatcaaaaaggatcttcacctagatccttttaaattaaaaatgaagttttaaatcaatctaaagtatatatgagtaaacttggtctgacagttaccaatgcttaatcagtgaggcacctatctcagcgatctgtctatttcgttcatccatagttgcctgactccccgtcgtgtagataactacgatacgggagggcttaccatctggccccagtgctgcaatgataccgcgagacccacgctcaccggctccagatttatcagcaataaaccagccagccggaagggccgagcgcagaagtggtcctgcaactttatccgcctccatccagtctattaattgttgccgggaagctagagtaagtagttcgccagttaatagtttgcgcaacgttgttgccattgctacaggcatcgtggtgtcacgctcgtcgtttggtatggcttcattcagctccggttcccaacgatcaaggcgagttacatgatcccccatgttgtgcaaaaaagcggttagctccttcggtcctccgatcgttgtcagaagtaagttggccgcagtgttatcactcatggttatggcagcactgcataattctcttactgtcatgccatccgtaagatgcttttctgtgactggtgagtactcaaccaagtcattctgagaatagtgtatgcggcgaccgagttgctcttgcccggcgtcaatacgggataataccgcgccacatagcagaactttaaaagtgctcatcattggaaaacgttcttcggggcgaaaactctcaaggatcttaccgctgttgagatccagttcgatgtaacccactcgtgcacccaactgatcttcagcatcttttactttcaccagcgtttctgggtgagcaaaaacaggaaggcaaaatgccgcaaaaaagggaataagggcgacacggaaatgttgaatactcatactcttcctttttcaatattattgaagcatttatcagggttattgtctcatgagcggatacatatttgaatgtatttagaaaaataaacaaataggggttccgcgcacatttccccgaaaagtgccacctgacgtctaagaaaccattattatcatgacattaacctataaaaataggcgtatcacgaggccctttcgtctcgcgcgtttcggtgatgacggtgaaaacctctgacacatgcagctcccggagacggtcacagcttgtctgtaagcggatgccgggagcagacaagcccgtcagggcgcgtcagcgggtgttggcgggtgtcggggctggcttaactatgcggcatcagagcagattgtactgagagtgcaccataaaattgtaaacgttaatattttgttaaaattcgcgttaaatttttgttaaatcagctcattttttaaccaataggccgaaatcggcaaaatcccttataaatcaaaagaatagcccgagatagggttgagtgttgttccagtttggaacaagagtccactattaaagaacgtggactccaacgtcaaagggcgaaaaaccgtctatcagggcgatggcccactacgtgaaccatcacccaaatcaagttttttggggtcgaggtgccgtaaagcactaaatcggaaccctaaagggagcccccgatttagagcttgacggggaaagccggcgaacgtggcgagaaaggaagggaagaaagcgaaaggagcgggcgctagggcgctggcaagtgtagcggtcacgctgcgcgtaaccaccacacccgccgcgcttaatgcgccgctacagggcgcgtactatggttgctttgacgtatgcggtgtgaaataccgcacagatgcgtaaggagaaaataccgcatcaggcgcccctgcaggcagctgcgcgctcgctcgctcactgaggccgcccgggcaaagcccgggcgtcgggcgacctttggtcgcccggcctcagtgagcgagcgagcgcgcagagagggagtggccaactccatcactaggggttcctgcggccgctcggtccgctagcgatgtaaggagctgctgtgacttgctcaaggccttatatcgagtaaacggtagtgctggggcttagacgcaggtgttctgatttatagttcaaaacctctatcaatgagagagcaatctcctggtaatgtgatagatttcccaacttaatgccaacataccataaacctcccattctgctaatgcccagcctaagttggggagaccactccagattccaagatgtacagtttgctttgctgggcctttttcccatgcctgcctttactctgccagagttatattgctggggttttgaagaagatcctattaaataaaagaataagcagtattattaagtagccctgcatttcaggtttccttgagtggcaggccaggcctggccgtgaacgttcactgaaatcatggcctcttggccaagattgatagcttgtgcctgtccctgagtcccagtccatcacgagcagctggtttctaagatgctatttcccgtataaagcatgagaccgtgacttgccagccccacagagccccgcccttgtccatcactggcatctggactccagcctgggttggggcaaagagggaaatgagatcatgtcctaaccctggaattggatcctcttgtcttacagatggatctggagcaacaaacttctcactactcaaacaagcaggtgacgtggaggagaatcccggccccatgaaatggaaagcactctttaccgccgcaatccttcaagcacagttgccaattaccgaggctgacattgtactgacgcaaagtccccctagcttggcgatgagtctcgggaagcgagcgacgattagttgccgagcttctgaaagtgtcacaatccttggctcccacctgatccattggtaccaacaaaaacctgggcagcccccgacgcttctcattcagttggcgtctaacgtgcaaacaggagtaccggccagattttcaggctcaggctctcgcaccgactttactctgaccatcgaccctgttgaggaggatgatgtagcagtttactactgtcttcagagcagaaccattcctcgcacattcggcggtggaacgaagttggaaatcaagggctcaacaagtgggagtgggaagcccggcagcggggagggttctactaaaggccaaatacagttggttcaatccgggcctgaactgaaaaagccgggagagaccgtgaaaatttcttgcaaggctagcgggtacacttttacggattactctattaactgggttaagagggcaccgggcaaagggctgaaatggatgggctggataaacaccgagactcgggagcctgcatatgcttatgatttcagaggtagatttgcgttctctttggaaacctcagcttcaacggcctacttgcagattaataacttgaagtacgaagacaccgccacttacttctgcgctctcgattactcatacgctatggattactggggccagggcacgtccgtgaccgtgtccagcgaacagaaacttatatcagaggaagaccttgcaattgaagttatgtatcctcctccttacctagacaatgagaagagcaatggaaccattatccatgtgaaagggaaacacctttgtccaagtcccctatttcccggaccttctaagcccttttgggtgctggtggtggttggtggagtcctggcttgctatagcttgctagtaacagtggcctttattattttctgggtgaggagtaagaggagcaggctcctgcacagtgactacatgaacatgactccccgccgccccgggcccacccgcaagcattaccagccctatgccccaccacgcgacttcgcagcctatcgctccagagtgaagttcagcaggagcgcagacgcccccgcgtaccagcagggccagaaccagctctataacgagctcaatctaggacgaagagaggagtacgatgttttggacaagagacgtggccgggaccctgagatggggggaaagccgagaaggaagaaccctcaggaaggcctgtacaatgaactgcagaaagataagatggcggaggcctacagtgagattgggatgaaaggcgagcgccggaggggcaaggggcacgatggcctttaccagggtctcagtacagccaccaaggacacctacgacgcccttcacatgcaggccctgccccctcgcggaagcggagctactaacttcagcctgctgaagcaggctggagacgtggaggagaaccctggacccaatatccagaaccctgaccctgccgtgtaccagctgagagactctaaatccagtgacaagtctgtctgcctattcaccgattttgattctcaaacaaatgtgtcacaaagtaaggattctgatgtgtatatcacagacaaaactgtgctagacatgaggtctatggacttcaagagcaacagtgctgtggcctggagcaacaaatctgactttgcatgtgcaaacgccttcaacaacagcattattccagaagacaccttcttccccagcccaggtaagggcagctttggtgccttcgcaggctgtttccttgcttcaggaatggccaggttctgcccagagctctggtcaatgatgtctaaaactcctctgattggtggtctcggccttatccattgccaccaaaaccctctttttactaagaaacagtgagccttgttctggcagtccagagaatgacacgggaaaaaagcagatgaagagaaggtggcaggagagggcacgtggcccagcctcagtctctccaactgagttcctgcctgcctgcctttgctcagactgtttgccccttactgctcttctaggcctcattctaagccccttctccaagttgacgcgtgcggccgcaggaacccctagtgatggagttggccactccctctctgcgcgctcgctcgctcactgaggccgggcgaccaaaggtcgcccgacgcccgggctttgcccgggcggcctcagtgagcgagcgagcgcgcagctgcctgcagg

SEQ ID NO: 447 - DNA, 4731 bp, synthetic construct
  source 1..4731: mol_type = other DNA
tcgcgcgtttcggtgatgacggtgaaaacctctgacacatgcagctcccggagacggtcacagcttgtctgtaagcggatgccgggagcagacaagcccgtcagggcgcgtcagcgggtgttggcgggtgtcggggctggcttaactatgcggcatcagagcagattgtactgagagtgcaccatatgcggtgtgaaataccgcacagatgcgtaaggagaaaataccgcatcaggcgccattcgccattcaggctgcgcaactgttgggaagggcgatcggtgcgggcctcttcgctattacgccagctggcgaaagggggatgtgctgcaaggcgattaagttgggtaacgccagggttttcccagtcacgacgttgtaaaacgacggccagtgaattcgagctcggtacccggggagtactgagagtgcaccaggatccgggaacctcttctgtaactccttagcagctgataatacgactcactatagggaccctcaaatccataaaaggattcaatcttcttcttctttttttttaggattcaatcttctaataatcccgggagggggcgcaagagcaggattcttgtttctattttacgaatgaggaaactgaggttcagaaagcctaagtggcatgcctcttcagtaatcggccaatcgtcgctgccctaacttcacctcacctcccagtgcagcactagagtcccctcaggggtggccgtccctggtcagtccagctccagcagacggggtgggtaggacgctccctatcaggcagcacttccgcctcccggggcccgcgcagctcacctccctcacctcccgccctaccccagtcacgagttgttttagggggaccgcccctccacttgctgattgggtagctcctgaaccattgttgtcctctgattggttgttcccttttcggctctgcaacaccgcctagaccgaccggatacacgggtagggcttccgctttacccgtctccctcctggcgcttgtcctcctctcccagtcggcaccacagcggtggctgccgggcgtggtgtcggtgggtcggttggtttttgtctcaccgttggtgtccgtgccgttcagttgcccgccatggctggatcgggtgggactagtggcgtgagcaagggcgaggaggataacatggccatcatcaaggagttcatgcgcttcaaggtgcacatggagggctccgtgaacggccacgagttcgagatcgagggcgagggcgagggccgcccctacgagggcacccagaccgccaagctgaaggtgaccaagggtggccccctgcccttcgcctgggacatcctgtcccctcagttcatgtacggctccaaggcctacgtgaagcaccccgccgacatccccgactacttgaagctgtccttccccgagggcttcaagtgggagcgcgtgatgaacttcgaggacggcggcgtggtgaccgtgacccaggactcctccctgcaggacggcgagttcatctacaaggtgaagctgcgcggcaccaacttcccctccgacggccccgtaatgcagaagaagaccatgggctgggaggcctcctccgagcggatgtaccccgaggacggcgccctgaagggcgagatcaagcagaggctgaagctgaaggacggcggccactacgacgctgaggtcaagaccacctacaaggccaagaagcccgtgcagctgcccggcgcctacaacgtcaacatcaagttggacatcacctcccacaacgaggactacaccatcgtggaacagtacgaacgcgccgagggccgccactccaccggcggcatggacgagctgtacaagggaaccggtgctggaagtggtgagctggatccgttcggcgcccctgccggcgcccctggcggtcccgcgctggggaacggagtggccggcgccggcgaagaagacccggctgcggccttcttggcgcagcaagagagcgagattgcgggcatcgagaacgacgaggccttcgccatcctggacggcggcgcccccgggccccagccgcacggcgagccgccggggggtccgggtgagagtgcgggcgcgtttggggcgagaggacttgtctggaaactcggtccacagtgggtccgagagcttctgtgtgactcgtgctccttgctgaattaggaggttagggagcagtgcaaacaggaaacgagaccctggcccggtctttcagaaacctaggctcgagaagcctgttcggttctcagcatgtttgagtgcttctgggcgcgggcggagcgagaaagcaagtgtagggtggcaggctccggagccggaagaagcccgttcaattcagcaacttttcattaagcatttgctgtgcctttagtccgggcttcctactatcgtcagagacttccctgctcacttgtttgccctcaggctcgagtcctcgctcactgactctcctctagagtcgacctgcaggcatgcaagcttggcgtaatcatggtcatagctgtttcctgtgtgaaattgttatccgctcacaattccacacaacatacgagccggaagcataaagtgtaaagcctggggtgcctaatgagtgagctaactcacattaattgcgttgcgctcactgcccgctttccagtcgggaaacctgtcgtgccagctgcattaatgaatcggccaacgcgcggggagaggcggtttgcgtattgggcgctcttccgcttcctcgctcactgactcgctgcgctcggtcgttcggctgcggcgagcggtatcagctcactcaaaggcggtaatacggttatccacagaatcaggggataacgcaggaaagaacatgtgagcaaaaggccagcaaaaggccaggaaccgtaaaaaggccgcgttgctggcgtttttccataggctccgcccccctgacgagcatcacaaaaatcgacgctcaagtcagaggtggcgaaacccgacaggactataaagataccaggcgtttccccctggaagctccctcgtgcgctctcctgttccgaccctgccgcttaccggatacctgtccgcctttctcccttcgggaagcgtggcgctttctcatagctcacgctgtaggtatctcagttcggtgtaggtcgttcgctccaagctgggctgtgtgcacgaaccccccgttcagcccgaccgctgcgccttatccggtaactatcgtcttgagtccaacccggtaagacacgacttatcgccactggcagcagccactggtaacaggattagcagagcgaggtatgtaggcggtgctacagagttcttgaagtggtggcctaactacggctacactagaaggacagtatttggtatctgcgctctgctgaagccagttaccttcggaaaaagagttggtagctcttgatccggcaaacaaaccaccgctggtagcggtggtttttttgtttgcaagcagcagattacgcgcagaaaaaaaggatctcaagaagatcctttgatcttttctacggggtctgacgctcagtggaacgaaaactcacgttaagggattttggtcatgagattatcaaaaaggatcttcacctagatccttttaaattaaaaatgaagttttaaatcaatctaaagtatatatgagtaaacttggtctgacagttaccaatgcttaatcagtgaggcacctatctcagcgatctgtctatttcgttcatccatagttgcctgactccccgtcgtgtagataactacgatacgggagggcttaccatctggccccagtgctgcaatgataccgcgagacccacgctcaccggctccagatttatcagcaataaaccagccagccggaagggccgagcgcagaagtggtcctgcaactttatccgcctccatccagtctattaattgttgccgggaagctagagtaagtagttcgccagttaatagtttgcgcaacgttgttgccattgctacaggcatcgtggtgtcacgctcgtcgtttggtatggcttcattcagctccggttcccaacgatcaaggcgagttacatgatcccccatgttgtgcaaaaaagcggttagctccttcggtcctccgatcgttgtcagaagtaagttggccgcagtgttatcactcatggttatggcagcactgcataattctcttactgtcatgccatccgtaagatgcttttctgtgactggtgagtactcaaccaagtcattctgagaatagtgtatgcggcgaccgagttgctcttgcccggcgtcaatacgggataataccgcgccacatagcagaactttaaaagtgctcatcattggaaaacgttcttcggggcgaaaactctcaaggatcttaccgctgttgagatccagttcgatgtaacccactcgtgcacccaactgatcttcagcatcttttactttcaccagcgtttctgggtgagcaaaaacaggaaggcaaaatgccgcaaaaaagggaataagggcgacacggaaatgttgaatactcatactcttcctttttcaatattattgaagcatttatcagggttattgtctcatgagcggatacatatttgaatgtatttagaaaaataaacaaataggggttccgcgcacatttccccgaaaagtgccacctgacgtctaagaaaccattattatcatgacattaacctataaaaataggcgtatcacgaggccctttcgtc

SEQ ID NO: 448 - DNA, 5370 bp, synthetic construct
  source 1..5370: mol_type = other DNA
tcgcgcgtttcggtgatgacggtgaaaacctctgacacatgcagctcccggagacggtcacagcttgtctgtaagcggatgccgggagcagacaagcccgtcagggcgcgtcagcgggtgttggcgggtgtcggggctggcttaactatgcggcatcagagcagattgtactgagagtgcaccatatgcggtgtgaaataccgcacagatgcgtaaggagaaaataccgcatcaggcgccattcgccattcaggctgcgcaactgttgggaagggcgatcggtgcgggcctcttcgctattacgccagctggcgaaagggggatgtgctgcaaggcgattaagttgggtaacgccagggttttcccagtcacgacgttgtaaaacgacggccagtgaagtaaaacgacggccagtgaattcgcctccacctcccaggttcaagcaattctcctgcctcagcctccagaggagctgggattacaggcatgcatcaccacgccgagctaatttttgttatttttagtagagacagggtttcaccatattggctaggccagtctcaaactcctgacctcaagtgatccccccacctcggcctcccaaagtgcttggattataggcatgggccaccgtgcccggcccctttctggatcatttctccattctctagaactaaggagctcaaacttttttgagtggaaacatgcgggacatttttacattgcaacccccaacacacaaaaagtgatcagtgcattctgacattctcttttttatttatttaaaacaaaacaaacaaaaaaaaacagggtcttactctgtcacccagctagagtgctgtggcataatcatagctcactgcagggtccaacttctgggctcaagcggtcctcccaccttggcccccttaagtgctgggattgcagtcataagccaccgtgcacggcctctctattctactccatttcatttttaaaaaaattgatggcctgagtgctgtggctcacacatgtgaatcccagcacttcaggaagctgatgcacgaggatcacttgagcccaggagttcaaaaccagcctggacaacatagtgagaccccatctctacatacacacacacatacatgcatacatacatacatacacacatacatagtaaaaaaattagccaggcatagtggctcatgcctgtaatcctagctactcaagaggctgaggtgggaggattctttgagccagggaggttgaggctgcagtgagctgtgatcatgccactgcactccagcctgggtgaggagagtgatatcctgtctcaaaaagtaataataataataattgatggttacattattacaaaggttagcatgagggaatttgaggtagggagtaatggaactggtgtataccttgattgtgatggtggtcacacacatctatatatgtgacattcacggaatcatgcagtaaagaaaaatcaatttcacgtctgttcattttaaaagtaacgttttttaagaagaaaaaaaatcgatagttgcagcccactagatagaattcatatcactcaggggttccaacctggagtatgaaaattcctgtccctaaaacccatgatagtggatagggggaggcagaaagggccattgctcgggctgtgggtgggtgagctggggagaagggagagagtgggaggtttcacttcctgaccctcctctcttctttctgcagtcgcttcctgcctcggatacccatacgatgtgcctgattacgcaggatcacggctcagctggtatgacccaggtaaggaagagccacatggagaaaggcctggggcagggggagagtggggctgtggtttcatcaggccatcggggacctctcgatgaagccatcacttctgccagagtgaaccccaccctatagagagagtgaaccccagcatacacacaggcacatagatgcagacactgcacattaagatgctcacatgcaggtgggtgccctcgacagccgtaaatcacccacaaatgccagatctcatgataattattatgacccgctcaccatgcacagaagacatcccagctcataaatgtaccttgcaaagtcttatttcccacccaatcctgacagatgctccatggtcaaagatgtttagagcggagtctgcagagagaggccgcagactgatggtaaagtgtgtggaacgtccagccttagacgttggagtttagtcgtagaggctgtttcccaaatagggttccatggagcatgttggacaaagggcaggcaacaccgcatctcccactgaagactgacagtgtacaccggcccagtaaaggatctgagaaatcctgcagcgaagaaatacatgacactttttaacccagcactttgcacccttatttcaccacagacctctccttcacattgactgggataacatcgtgctgaatgtacctggggagaattgtggctgaagggtcttgagatgccactgtgcagccagagggggtgacaggggccttggcaggccctaagcacgatctgggccctgcactgacatcctagctccaagctttggcacactgcttgacctcttgagcccgtttccccagctgtgaaatgggaagaaaatctcttgcctggtgaagcggcaacgagccagctcgctgggcggacagcctgcaaatcaccccaccaatgttaggtgttgagacgcgctcgttctccctctaaccagccaagtgcccttggcgagccctggccctgagctttggccccagagtgtcctcgtcggaagaaaagggtagcctgacccgtggttcccgaccagggaaaacctccccctcagaatcacctgggagagcctttcacatttctaaaaatttcttgaatcagtgacacattcatccagctcaaaaatttaaaaaaatataaaaagatctgtagtgaagagtctcacttccatctctattcccgtctatcccagtcgcccccgacgtcgaccccaacaccccaggtaatgactacgtttatttgtttcttgcatattcttcaaggagctctttatgcaaatgaattcgagctcggtacccggggatcctctagagtcgacctgcaggcatgcaagcttggcgtaatcatggtcatagctgtttcctgtgtgaaattgttatccgctcacaattccacacaacatacgagccggaagcataaagtgtaaagcctggggtgcctaatgagtgagctaactcacattaattgcgttgcgctcactgcccgctttccagtcgggaaacctgtcgtgccagctgcattaatgaatcggccaacgcgcggggagaggcggtttgcgtattgggcgctcttccgcttcctcgctcactgactcgctgcgctcggtcgttcggctgcggcgagcggtatcagctcactcaaaggcggtaatacggttatccacagaatcaggggataacgcaggaaagaacatgtgagcaaaaggccagcaaaaggccaggaaccgtaaaaaggccgcgttgctggcgtttttccataggctccgcccccctgacgagcatcacaaaaatcgacgctcaagtcagaggtggcgaaacccgacaggactataaagataccaggcgtttccccctggaagctccctcgtgcgctctcctgttccgaccctgccgcttaccggatacctgtccgcctttctcccttcgggaagcgtggcgctttctcatagctcacgctgtaggtatctcagttcggtgtaggtcgttcgctccaagctgggctgtgtgcacgaaccccccgttcagcccgaccgctgcgccttatccggtaactatcgtcttgagtccaacccggtaagacacgacttatcgccactggcagcagccactggtaacaggattagcagagcgaggtatgtaggcggtgctacagagttcttgaagtggtggcctaactacggctacactagaaggacagtatttggtatctgcgctctgctgaagccagttaccttcggaaaaagagttggtagctcttgatccggcaaacaaaccaccgctggtagcggtggtttttttgtttgcaagcagcagattacgcgcagaaaaaaaggatctcaagaagatcctttgatcttttctacggggtctgacgctcagtggaacgaaaactcacgttaagggattttggtcatgagattatcaaaaaggatcttcacctagatccttttaaattaaaaatgaagttttaaatcaatctaaagtatatatgagtaaacttggtctgacagttaccaatgcttaatcagtgaggcacctatctcagcgatctgtctatttcgttcatccatagttgcctgactccccgtcgtgtagataactacgatacgggagggcttaccatctggccccagtgctgcaatgataccgcgagacccacgctcaccggctccagatttatcagcaataaaccagccagccggaagggccgagcgcagaagtggtcctgcaactttatccgcctccatccagtctattaattgttgccgggaagctagagtaagtagttcgccagttaatagtttgcgcaacgttgttgccattgctacaggcatcgtggtgtcacgctcgtcgtttggtatggcttcattcagctccggttcccaacgatcaaggcgagttacatgatcccccatgttgtgcaaaaaagcggttagctccttcggtcctccgatcgttgtcagaagtaagttggccgcagtgttatcactcatggttatggcagcactgcataattctcttactgtcatgccatccgtaagatgcttttctgtgactggtgagtactcaaccaagtcattctgagaatagtgtatgcggcgaccgagttgctcttgcccggcgtcaatacgggataataccgcgccacatagcagaactttaaaagtgctcatcattggaaaacgttcttcggggcgaaaactctcaaggatcttaccgctgttgagatccagttcgatgtaacccactcgtgcacccaactgatcttcagcatcttttactttcaccagcgtttctgggtgagcaaaaacaggaaggcaaaatgccgcaaaaaagggaataagggcgacacggaaatgttgaatactcatactcttcctttttcaatattattgaagcatttatcagggttattgtctcatgagcggatacatatttgaatgtatttagaaaaataaacaaataggggttccgcgcacatttccccgaaaagtgccacctgacgtctaagaaaccattattatcatgacattaacctataaaaataggcgtatcacgaggccctttcgtc

SEQ ID NO: 449 - DNA, 61 bp, synthetic construct
  source 1..61: mol_type = other DNA
tcaggaagatggattcatacctgctgatgtggggactgctcacgttcatcatggtgcctgg

SEQ ID NO: 450 - DNA, 46 bp, synthetic construct
  source 1..46: mol_type = other DNA
tcaggaagatggattcatacctgctcccgggcggccgggtgccggg

SEQ ID NO: 451 - DNA, 86 bp, synthetic construct
  source 1..86: mol_type = other DNA
aagagggaaatgagatcatgtcctaaccctgatcctcttgtcccacagatatccagaaccctgaccctgccgtgtaccagctgaga

SEQ ID NO: 452 - DNA, 54 bp, synthetic construct
  source 1..54: mol_type = other DNA
aagagggaaatgagatcatgtcctaaccctgaccctgccgtgtaccagctgaga
